United States Patent Application Publication US 2009/0123928 A1 - sequence listing, part 4

SEQ ID NO: 99370 - DNA, 21 bp, Artificial Sequence
  primer
caccaaggccatatagtcacg

SEQ ID NO: 99371 - DNA, 38 bp, Artificial Sequence
  primer
gtaaaacgacggccagtaacaaccaccctaagcctctg

SEQ ID NO: 99372 - DNA, 21 bp, Artificial Sequence
  primer
acagctgtcggttctgtttcc

SEQ ID NO: 99373 - DNA, 38 bp, Artificial Sequence
  primer
gtaaaacgacggccagtaaatatcttgcggaccaaagg

SEQ ID NO: 99374 - DNA, 21 bp, Artificial Sequence
  primer
cacatcacagacctcacggac

SEQ ID NO: 99375 - DNA, 38 bp, Artificial Sequence
  primer
gtaaaacgacggccagtcaacaattctggccctcaatc

SEQ ID NO: 99376 - DNA, 27 bp, Artificial Sequence
  primer
ttattacttcagtcatacagccaactg

SEQ ID NO: 99377 - DNA, 21 bp, Artificial Sequence
  primer
acagtggtggctcctatgcag

SEQ ID NO: 99378 - DNA, 38 bp, Artificial Sequence
  primer
gtaaaacgacggccagtgaagggccagatctcgtgtag

SEQ ID NO: 99379 - DNA, 23 bp, Artificial Sequence
  primer
gagctgaactttaggctttggag

SEQ ID NO: 99380 - DNA, 21 bp, Artificial Sequence
  primer
ctgcaaagcaagtcagacacc

SEQ ID NO: 99381 - DNA, 37 bp, Artificial Sequence
  primer
gtaaaacgacggccagttcaccacagtccgaaggaag

SEQ ID NO: 99382 - DNA, 35 bp, Artificial Sequence
  primer
gtaaaacgacggccagtgcattgtgtgcgtggttg

SEQ ID NO: 99383 - DNA, 21 bp, Artificial Sequence
  primer
acctccttggtttcattgtgg

SEQ ID NO: 99384 - DNA, 21 bp, Artificial Sequence
  primer
tgaaggtctgactgtgcatcc

SEQ ID NO: 99385 - DNA, 38 bp, Artificial Sequence
  primer
gtaaaacgacggccagttttgctttcctttccttgtgg

SEQ ID NO: 99386 - DNA, 35 bp, Artificial Sequence
  primer
gtaaaacgacggccagtgggagatcccaaacctgg

SEQ ID NO: 99387 - DNA, 37 bp, Artificial Sequence
  primer
gtaaaacgacggccagtgggacagactcagagcatgg

SEQ ID NO: 99388 - DNA, 38 bp, Artificial Sequence
  primer
gtaaaacgacggccagtggtgtggagttggtgtgacag

SEQ ID NO: 99389 - DNA, 37 bp, Artificial Sequence
  primer
gtaaaacgacggccagtgaaagccgtgtagggagcag

SEQ ID NO: 99390 - DNA, 38 bp, Artificial Sequence
  primer
gtaaaacgacggccagtaagaggtgggagtgagcaaag

SEQ ID NO: 99391 - DNA, 38 bp, Artificial Sequence
  primer
gtaaaacgacggccagtcagcaaatcatcaccttccag

SEQ ID NO: 99392 - DNA, 19 bp, Artificial Sequence
  primer
tggcaggcacctgtagtcc

SEQ ID NO: 99393 - DNA, 20 bp, Artificial Sequence
  primer
agaacacttccatgcggttg

SEQ ID NO: 99394 - DNA, 38 bp, Artificial Sequence
  primer
gtaaaacgacggccagtcattccctctcaaattcccag

SEQ ID NO: 99395 - DNA, 21 bp, Artificial Sequence
  primer
gatggatggtttctttccagc

SEQ ID NO: 99396 - DNA, 21 bp, Artificial Sequence
  primer
tgaatgtgacatccgggtaag

SEQ ID NO: 99397 - DNA, 21 bp, Artificial Sequence
  primer
gatgctaactgcaaccaccag

SEQ ID NO: 99398 - DNA, 21 bp, Artificial Sequence
  primer
atgactttcgccaccttcttc

SEQ ID NO: 99399 - DNA, 38 bp, Artificial Sequence
  primer
gtaaaacgacggccagtaactagaggccagtcacccac

SEQ ID NO: 99400 - DNA, 37 bp, Artificial Sequence
  primer
gtaaaacgacggccagtgaataagtgcagccctggtg

SEQ ID NO: 99401 - DNA, 20 bp, Artificial Sequence
  primer
caaaggctggtccatctcag

SEQ ID NO: 99402 - DNA, 39 bp, Artificial Sequence
  primer
gtaaaacgacggccagtttactgggctggatattcaagg

SEQ ID NO: 99403 - DNA, 21 bp, Artificial Sequence
  primer
attcccatcattgctgcagag

SEQ ID NO: 99404 - DNA, 38 bp, Artificial Sequence
  primer
gtaaaacgacggccagtaaaccaggagggtagacgagg

SEQ ID NO: 99405 - DNA, 38 bp, Artificial Sequence
  primer
gtaaaacgacggccagtcagggctatattgggcatcac

SEQ ID NO: 99406 - DNA, 21 bp, Artificial Sequence
  primer
tatgatgctttggattggcag

SEQ ID NO: 99407 - DNA, 38 bp, Artificial Sequence
  primer
gtaaaacgacggccagttggacacttcaacactctgcc

SEQ ID NO: 99408 - DNA, 38 bp, Artificial Sequence
  primer
gtaaaacgacggccagtcttcttccgcacactcttctg

SEQ ID NO: 99409 - DNA, 19 bp, Artificial Sequence
  primer
agtgctggtgcggaatttg

SEQ ID NO: 99410 - DNA, 38 bp, Artificial Sequence
  primer
gtaaaacgacggccagtataagaggcccagattcctcg

SEQ ID NO: 99411 - DNA, 38 bp, Artificial Sequence
  primer
gtaaaacgacggccagtgaatcccttcttccaccttcc

SEQ ID NO: 99412 - DNA, 21 bp, Artificial Sequence
  primer
gcacttacgcttacctgggtc

SEQ ID NO: 99413 - DNA, 20 bp, Artificial Sequence
  primer
gctggtgagtgccaagattc

SEQ ID NO: 99414 - DNA, 38 bp, Artificial Sequence
  primer
gtaaaacgacggccagttcactggtctgggtctgtctg

SEQ ID NO: 99415 - DNA, 21 bp, Artificial Sequence
  primer
ctaggtgtgaagtcgtccagg

SEQ ID NO: 99416 - DNA, 38 bp, Artificial Sequence
  primer
gtaaaacgacggccagtacgatggagaaggtgacaagc

SEQ ID NO: 99417 - DNA, 21 bp, Artificial Sequence
  primer
agcttctccaggaagacgacc

SEQ ID NO: 99418 - DNA, 18 bp, Artificial Sequence
  primer
ccactggtgcaggctcag

SEQ ID NO: 99419 - DNA, 38 bp, Artificial Sequence
  primer
gtaaaacgacggccagtttccaccgactccaatttagg

SEQ ID NO: 99420 - DNA, 21 bp, Artificial Sequence
  primer
ttcctggtagctcactcgtcc

SEQ ID NO: 99421 - DNA, 26 bp, Artificial Sequence
  primer
ttcttaccaagctcatagtgattcag

SEQ ID NO: 99422 - DNA, 22 bp, Artificial Sequence
  primer
aacttctcgttctttccttggg

SEQ ID NO: 99423 - DNA, 38 bp, Artificial Sequence
  primer
gtaaaacgacggccagtcttcccacaaatctccctgag

SEQ ID NO: 99424 - DNA, 21 bp, Artificial Sequence
  primer
tctcctgacctcatgatccac

SEQ ID NO: 99425 - DNA, 21 bp, Artificial Sequence
  primer
cctttgcgttcagtatttccc

SEQ ID NO: 99426 - DNA, 21 bp, Artificial Sequence
  primer
cgtggaagaagatctgtggtg

SEQ ID NO: 99427 - DNA, 38 bp, Artificial Sequence
  primer
gtaaaacgacggccagtgtctttggcctacctttacgg

SEQ ID NO: 99428 - DNA, 39 bp, Artificial Sequence
  primer
gtaaaacgacggccagtgctatgttatgtcagggcttgc

SEQ ID NO: 99429 - DNA, 21 bp, Artificial Sequence
  primer
agcacatgcatttggattctg

SEQ ID NO: 99430 - DNA, 35 bp, Artificial Sequence
  primer
gtaaaacgacggccagtcacctgtggccagtccag

SEQ ID NO: 99431 - DNA, 38 bp, Artificial Sequence
  primer
gtaaaacgacggccagtgaacttcatggacccttctgc

SEQ ID NO: 99432 - DNA, 21 bp, Artificial Sequence
  primer
attcctggacagacaggcaag

SEQ ID NO: 99433 - DNA, 21 bp, Artificial Sequence
  primer
ctggatgactcttagggctgg

SEQ ID NO: 99434 - DNA, 38 bp, Artificial Sequence
  primer
gtaaaacgacggccagtcacgatcttggagatgagcag

SEQ ID NO: 99435 - DNA, 38 bp, Artificial Sequence
  primer
gtaaaacgacggccagtgagacttggaagctgcagagg

SEQ ID NO: 99436 - DNA, 38 bp, Artificial Sequence
  primer
gtaaaacgacggccagtgaagtgggaagctggtgctac

SEQ ID NO: 99437 - DNA, 38 bp, Artificial Sequence
  primer
gtaaaacgacggccagttccaaggcattcagagaggac

SEQ ID NO: 99438 - DNA, 21 bp, Artificial Sequence
  primer
ggagtggagtgagtgaggagc

SEQ ID NO: 99439 - DNA, 40 bp, Artificial Sequence
  primer
gtaaaacgacggccagtttctagcttcctccatggctatc

SEQ ID NO: 99440 - DNA, 39 bp, Artificial Sequence
  primer
gtaaaacgacggccagtcagccaagatggtcttgatctc

SEQ ID NO: 99441 - DNA, 38 bp, Artificial Sequence
  primer
gtaaaacgacggccagtacaagcacgttgcaggagtag

SEQ ID NO: 99442 - DNA, 21 bp, Artificial Sequence
  primer
gagggcagcactaatccagac

SEQ ID NO: 99443 - DNA, 21 bp, Artificial Sequence
  primer
ccttctgtgtctagctgcgtg

SEQ ID NO: 99444 - DNA, 21 bp, Artificial Sequence
  primer
aatcatacagccctccctctg

SEQ ID NO: 99445 - DNA, 20 bp, Artificial Sequence
  primer
ggcaaacactcagcttggag

SEQ ID NO: 99446 - DNA, 21 bp, Artificial Sequence
  primer
acagctcactgcagctttgac

SEQ ID NO: 99447 - DNA, 35 bp, Artificial Sequence
  primer
gtaaaacgacggccagtgccagagtgggtgtgagg

SEQ ID NO: 99448 - DNA, 20 bp, Artificial Sequence
  primer
ttggtgtgtgcctctaaggg

SEQ ID NO: 99449 - DNA, 38 bp, Artificial Sequence
  primer
gtaaaacgacggccagtcctcccttccttggactcttc

SEQ ID NO: 99450 - DNA, 21 bp, Artificial Sequence
  primer
tgtctttgtcttcccagtccc

SEQ ID NO: 99451 - DNA, 21 bp, Artificial Sequence
  primer
gaagtgagatttcagggccag

SEQ ID NO: 99452 - DNA, 38 bp, Artificial Sequence
  primer
gtaaaacgacggccagtagggactcgcagggtttctat

SEQ ID NO: 99453 - DNA, 20 bp, Artificial Sequence
  primer
acaggtctgcaccctctcag

SEQ ID NO: 99454 - DNA, 21 bp, Artificial Sequence
  primer
ctgttcccatctgtacctccg

SEQ ID NO: 99455 - DNA, 21 bp, Artificial Sequence
  primer
cgagaatgatttcaggacagg

SEQ ID NO: 99456 - DNA, 20 bp, Artificial Sequence
  primer
atggagaccgtgcatttctg

SEQ ID NO: 99457 - DNA, 19 bp, Artificial Sequence
  primer
gacgtccagcagcagtgag

SEQ ID NO: 99458 - DNA, 36 bp, Artificial Sequence
  primer
gtaaaacgacggccagtgagcaataagcccaccgac

SEQ ID NO: 99459 - DNA, 20 bp, Artificial Sequence
  primer
gaagttcacggcatccacac

SEQ ID NO: 99460 - DNA, 38 bp, Artificial Sequence
  primer
gtaaaacgacggccagttcggcacagtcagtaaagagg

SEQ ID NO: 99461 - DNA, 21 bp, Artificial Sequence
  primer
cttgctttctggaagactggc

SEQ ID NO: 99462 - DNA, 37 bp, Artificial Sequence
  primer
gtaaaacgacggccagtagcctagcaggagcttggag

SEQ ID NO: 99463 - DNA, 20 bp, Artificial Sequence
  primer
atttagggccctccaacctc

SEQ ID NO: 99464 - DNA, 36 bp, Artificial Sequence
  primer
gtaaaacgacggccagtcaggcaactctcaggaggc

SEQ ID NO: 99465 - DNA, 21 bp, Artificial Sequence
  primer
acctgctccatccagttcttc

SEQ ID NO: 99466 - DNA, 21 bp, Artificial Sequence
  primer
tagcctgagatgggcacagag

SEQ ID NO: 99467 - DNA, 20 bp, Artificial Sequence
  primer
atgggagggatttgaccttg

SEQ ID NO: 99468 - DNA, 21 bp, Artificial Sequence
  primer
gtcgtaatgccactctgttcc

SEQ ID NO: 99469 - DNA, 20 bp, Artificial Sequence
  primer
accaccaggaggaaggtcag

SEQ ID NO: 99470 - DNA, 36 bp, Artificial Sequence
  primer
gtaaaacgacggccagtacaggtgagtactgccggg

SEQ ID NO: 99471 - DNA, 21 bp, Artificial Sequence
  primer
ctccagcactcatctgctgtg

SEQ ID NO: 99472 - DNA, 37 bp, Artificial Sequence
  primer
gtaaaacgacggccagtatcccactgccctatcttgg

SEQ ID NO: 99473 - DNA, 21 bp, Artificial Sequence
  primer
ctcagtaggagaacgtggctg

SEQ ID NO: 99474 - DNA, 38 bp, Artificial Sequence
  primer
gtaaaacgacggccagtaggaagtagaggtcgcagtcg

SEQ ID NO: 99475 - DNA, 20 bp, Artificial Sequence
  primer
ccacggtcaggttgagtagc

SEQ ID NO: 99476 - DNA, 38 bp, Artificial Sequence
  primer
gtaaaacgacggccagtcaggaacccgtagatctcctc

SEQ ID NO: 99477 - DNA, 38 bp, Artificial Sequence
  primer
gtaaaacgacggccagtgacacgaagatgaggtgggag

SEQ ID NO: 99478 - DNA, 22 bp, Artificial Sequence
  primer
cctctgtaacatgaaggaacgg

SEQ ID NO: 99479 - DNA, 38 bp, Artificial Sequence
  primer
gtaaaacgacggccagtaaaggctctaacgcagacgtg

SEQ ID NO: 99480 - DNA, 21 bp, Artificial Sequence
  primer
agtcccttcaggtcaaaccag

SEQ ID NO: 99481 - DNA, 21 bp, Artificial Sequence
  primer
ctgcctctcactgatgcaaac

SEQ ID NO: 99482 - DNA, 39 bp, Artificial Sequence
  primer
gtaaaacgacggccagtgatagtcgggtatgacaccagg

SEQ ID NO: 99483 - DNA, 38 bp, Artificial Sequence
  primer
gtaaaacgacggccagtgtggaggaagggtcatttctg

SEQ ID NO: 99484 - DNA, 21 bp, Artificial Sequence
  primer
ttggaagaggcagaaatcagg

SEQ ID NO: 99485 - DNA, 21 bp, Artificial Sequence
  primer
ggagaaagcaaccactgaagg

SEQ ID NO: 99486 - DNA, 21 bp, Artificial Sequence
  primer
agataggccacaaactcctcg

SEQ ID NO: 99487 - DNA, 38 bp, Artificial Sequence
  primer
gtaaaacgacggccagtttcaggtagcttggcactgag

SEQ ID NO: 99488 - DNA, 38 bp, Artificial Sequence
  primer
gtaaaacgacggccagtaggacgacccatcctatttcc

SEQ ID NO: 99489 - DNA, 21 bp, Artificial Sequence
  primer
ggaccagtcgtagcctctcac

SEQ ID NO: 99490 - DNA, 37 bp, Artificial Sequence
  primer
gtaaaacgacggccagtcacgtagcagtagatggccc

SEQ ID NO: 99491 - DNA, 38 bp, Artificial Sequence
  primer
gtaaaacgacggccagtaacttgcggtagaactcctcg

SEQ ID NO: 99492 - DNA, 38 bp, Artificial Sequence
  primer
gtaaaacgacggccagtaggtactggatgaagttggcg

SEQ ID NO: 99493 - DNA, 21 bp, Artificial Sequence
  primer
aagctttcagtctcggaggag

SEQ ID NO: 99494 - DNA, 38 bp, Artificial Sequence
  primer
gtaaaacgacggccagtagtggagtgaacaagaagccc

SEQ ID NO: 99495 - DNA, 38 bp, Artificial Sequence
  primer
gtaaaacgacggccagtcgtctagagcctttctgtgcc

SEQ ID NO: 99496 - DNA, 38 bp, Artificial Sequence
  primer
gtaaaacgacggccagttcactgctctctgacaaagcc

SEQ ID NO: 99497 - DNA, 19 bp, Artificial Sequence
  primer
gagcttgttgcggtaagcc

SEQ ID NO: 99498 - DNA, 35 bp, Artificial Sequence
  primer
gtaaaacgacggccagtcccagggaagctcaggtc

SEQ ID NO: 99499 - DNA, 20 bp, Artificial Sequence
  primer
gtcagctggagcaagtggag

SEQ ID NO: 99500 - DNA, 21 bp, Artificial Sequence
  primer
ttgtgccacttgtagtccagg

SEQ ID NO: 99501 - DNA, 18 bp, Artificial Sequence
  primer
cggtaaggagtgcggagg

SEQ ID NO: 99502 - DNA, 21 bp, Artificial Sequence
  primer
actggaagacagagaggtcgc

SEQ ID NO: 99503 - DNA, 39 bp, Artificial Sequence
  primer
gtaaaacgacggccagtcaccctttatgactagtgtgcg

SEQ ID NO: 99504 - DNA, 21 bp, Artificial Sequence
  primer
tctgcagcgtcttagccatac

SEQ ID NO: 99505 - DNA, 21 bp, Artificial Sequence
  primer
caccacagggaatcaggtctc

SEQ ID NO: 99506 - DNA, 21 bp, Artificial Sequence
  primer
ttgtggctgttccttgaaatg

SEQ ID NO: 99507 - DNA, 21 bp, Artificial Sequence
  primer
catttgcaggtccacagagag

SEQ ID NO: 99508 - DNA, 20 bp, Artificial Sequence
  primer
cctgctggttgaagaactcg

SEQ ID NO: 99509 - DNA, 38 bp, Artificial Sequence
  primer
gtaaaacgacggccagtcggttcttgcagtggtacttc

SEQ ID NO: 99510 - DNA, 37 bp, Artificial Sequence
  primer
gtaaaacgacggccagtccagccacttcttccaggtc

SEQ ID NO: 99511 - DNA, 21 bp, Artificial Sequence
  primer
tcttctgcgtggagtagatgc

SEQ ID NO: 99512 - DNA, 36 bp, Artificial Sequence
  primer
gtaaaacgacggccagttctcctccagcaggctgac

SEQ ID NO: 99513 - DNA, 38 bp, Artificial Sequence
  primer
gtaaaacgacggccagtctactgctacaggaggcgctg

SEQ ID NO: 99514 - DNA, 38 bp, Artificial Sequence
  primer
gtaaaacgacggccagttgttctcccactgaaagaggc

SEQ ID NO: 99515 - DNA, 21 bp, Artificial Sequence
  primer
gagatctccctttgtgcgttc

SEQ ID NO: 99516 - DNA, 21 bp, Artificial Sequence
  primer
ccaagcctgggagacattaag

SEQ ID NO: 99517 - DNA, 21 bp, Artificial Sequence
  primer
atgtaggcaaggctcagaagc

SEQ ID NO: 99518 - DNA, 21 bp, Artificial Sequence
  primer
atgtaggcatcaaacacgtcc

SEQ ID NO: 99519 - DNA, 39 bp, Artificial Sequence
  primer
gtaaaacgacggccagtacagtgtcttgcatacgtcctg

SEQ ID NO: 99520 - DNA, 18 bp, Artificial Sequence
  primer
ttgtcgcgtgccagtatc

SEQ ID NO: 99521 - DNA, 18 bp, Artificial Sequence
  primer
gaatcaggcgcaggtgag

SEQ ID NO: 99522 - DNA, 21 bp, Artificial Sequence
  primer
ggatcttagtgaagggcaacg

SEQ ID NO: 99523 - DNA, 35 bp, Artificial Sequence
  primer
gtaaaacgacggccagtgtgaggtcacgctgctgg

SEQ ID NO: 99524 - DNA, 19 bp, Artificial Sequence
  primer
ccctctccaccatgcagtc

SEQ ID NO: 99525 - DNA, 20 bp, Artificial Sequence
  primer
catcaaacacgtccatgtcg

SEQ ID NO: 99526 - DNA, 21 bp, Artificial Sequence
  primer
gcacagtgtcttgcatacgtc

SEQ ID NO: 99527 - DNA, 39 bp, Artificial Sequence
  primer
gtaaaacgacggccagtcgcattcctagacgaagtatgg

SEQ ID NO: 99528 - DNA, 35 bp, Artificial Sequence; identical to SEQ ID NO: 99523
  primer

SEQ ID NO: 99529 - DNA, 36 bp, Artificial Sequence
  primer
gtaaaacgacggccagtccctctccaccatgcagtc

SEQ ID NO: 99530 - DNA, 20 bp, Artificial Sequence
  primer
cactggaagaggtcggacag

SEQ ID NO: 99531 - DNA, 18 bp, Artificial Sequence
  primer
cagcgggtagagcacctg

SEQ ID NO: 99532 - DNA, 38 bp, Artificial Sequence
  primer
gtaaaacgacggccagtggtgatgttatggatccaggc

SEQ ID NO: 99533 - DNA, 36 bp, Artificial Sequence
  primer
gtaaaacgacggccagtcagatcaagggcgaggttg

SEQ ID NO: 99534 - DNA, 21 bp, Artificial Sequence
  primer
aaacgtgcagtccttgcctac

SEQ ID NO: 99535 - DNA, 21 bp, Artificial Sequence
  primer
agatgccacatgggctcatac

SEQ ID NO: 99536 - DNA, 21 bp, Artificial Sequence
  primer
atgaccttgttagtccgccag

SEQ ID NO: 99537 - DNA, 38 bp, Artificial Sequence
  primer
gtaaaacgacggccagtagcagtccctgcctagacttg

SEQ ID NO: 99538 - DNA, 20 bp, Artificial Sequence
  primer
catagcgcagcctcaggtag

SEQ ID NO: 99539 - DNA, 38 bp, Artificial Sequence
  primer
gtaaaacgacggccagtcaggactttcccatcctcttg

SEQ ID NO: 99540 - DNA, 38 bp, Artificial Sequence
  primer
gtaaaacgacggccagtcattgagactaacgccttccc

SEQ ID NO: 99541 - DNA, 19 bp, Artificial Sequence
  primer
tagcaccgtgcaaagaagc

SEQ ID NO: 99542 - DNA, 38 bp, Artificial Sequence
  primer
gtaaaacgacggccagtatagtggacggtgttgtgctg

SEQ ID NO: 99543 - DNA, 38 bp, Artificial Sequence
  primer
gtaaaacgacggccagtagcatcttggtgtaggtgctg

SEQ ID NO: 99544 - DNA, 38 bp, Artificial Sequence
  primer
gtaaaacgacggccagtatgctctcgaacttgcctacg

SEQ ID NO: 99545 - DNA, 38 bp, Artificial Sequence
  primer
gtaaaacgacggccagtcagtacagatctgcaaagggc

SEQ ID NO: 99546 - DNA, 38 bp, Artificial Sequence
  primer
gtaaaacgacggccagttcagccaaggaatgaggaaac

SEQ ID NO: 99547 - DNA, 21 bp, Artificial Sequence
  primer
caccaaacaaatgcctaccag

SEQ ID NO: 99548 - DNA, 26 bp, Artificial Sequence
  primer
cataactgatgtgaaagtgagaaagc

SEQ ID NO: 99549 - DNA, 38 bp, Artificial Sequence
  primer
gtaaaacgacggccagtaccctccaagactttacgcac

SEQ ID NO: 99550 - DNA, 21 bp, Artificial Sequence
  primer
agacaaagaaagcgcatggtc

SEQ ID NO: 99551 - DNA, 38 bp, Artificial Sequence
  primer
gtaaaacgacggccagtaattggaacagccagccttag

SEQ ID NO: 99552 - DNA, 21 bp, Artificial Sequence
  primer
aattgcctttccgaatactgg

SEQ ID NO: 99553 - DNA, 38 bp, Artificial Sequence
  primer
gtaaaacgacggccagtgtctcacgacttgagcattgg

SEQ ID NO: 99554 - DNA, 38 bp, Artificial Sequence
  primer
gtaaaacgacggccagtaactttgtgccaattggtgtc

SEQ ID NO: 99555 - DNA, 37 bp, Artificial Sequence
  primer
gtaaaacgacggccagtagaccagacacactgcaccc

SEQ ID NO: 99556 - DNA, 38 bp, Artificial Sequence
  primer
gtaaaacgacggccagtagaagatatgcgctcaaagcc

SEQ ID NO: 99557 - DNA, 38 bp, Artificial Sequence
  primer
gtaaaacgacggccagtttgatcatctccatgacctgc

SEQ ID NO: 99558 - DNA, 22 bp, Artificial Sequence
  primer
caaggatccagattcctgattg

SEQ ID NO: 99559 - DNA, 38 bp, Artificial Sequence
  primer
gtaaaacgacggccagtaatctgcatgtcggctttagg

SEQ ID NO: 99560 - DNA, 21 bp, Artificial Sequence
  primer
aatacacgtgatgccaaaccc

SEQ ID NO: 99561 - DNA, 21 bp, Artificial Sequence
  primer
gctggacattaggctgtcctc

SEQ ID NO: 99562 - DNA, 39 bp, Artificial Sequence
  primer
gtaaaacgacggccagtgcaagaagatgtgttcaaaggc

SEQ ID NO: 99563 - DNA, 35 bp, Artificial Sequence
  primer
gtaaaacgacggccagtcccgagacagcagatccc

SEQ ID NO: 99564 - DNA, 20 bp, Artificial Sequence
  primer
acacatgcagggaaccagag

SEQ ID NO: 99565 - DNA, 21 bp, Artificial Sequence
  primer
gactgctctcagccatggaac

SEQ ID NO: 99566 - DNA, 38 bp, Artificial Sequence
  primer
gtaaaacgacggccagtaggacccgctttaagcaaatg

SEQ ID NO: 99567 - DNA, 38 bp, Artificial Sequence
  primer
gtaaaacgacggccagtcaaacaacaggctggaatcag

SEQ ID NO: 99568 - DNA, 38 bp, Artificial Sequence
  primer
gtaaaacgacggccagtgacctgagactggagaggacc

SEQ ID NO: 99569 - DNA, 20 bp, Artificial Sequence
  primer
cctgtgctcagttcaccacc

SEQ ID NO: 99570 - DNA, 21 bp, Artificial Sequence
  primer
gaaagtcaacaggctgcaagg

SEQ ID NO: 99571 - DNA, 19 bp, Artificial Sequence
  primer
aacatccacacccggtttc

SEQ ID NO: 99572 - DNA, 38 bp, Artificial Sequence
  primer
gtaaaacgacggccagtggtcagaggacacggtgagtc

SEQ ID NO: 99573 - DNA, 18 bp, Artificial Sequence
  primer
agcccaggacacagggac

SEQ ID NO: 99574 - DNA, 19 bp, Artificial Sequence
  primer
agacctggtggagaagggc

SEQ ID NO: 99575 - DNA, 21 bp, Artificial Sequence
  primer
caggaactagacatagggcgg

SEQ ID NO: 99576 - DNA, 19 bp, Artificial Sequence
  primer
gcctcgaaggtagtgctgg

SEQ ID NO: 99577 - DNA, 37 bp, Artificial Sequence
  primer
gtaaaacgacggccagtaacctgcctctctcagcacc

SEQ ID NO: 99578 - DNA, 38 bp, Artificial Sequence
  primer
gtaaaacgacggccagtaaacggagtgttggaaagtgc

SEQ ID NO: 99579 - DNA, 38 bp, Artificial Sequence
  primer
gtaaaacgacggccagtgatctggccacacagggatac

SEQ ID NO: 99580 - DNA, 36 bp, Artificial Sequence
  primer
gtaaaacgacggccagtcctagccacagccctgaag

SEQ ID NO: 99581 - DNA, 21 bp, Artificial Sequence
  primer
agtccctgatgtacaggctgc

SEQ ID NO: 99582 - DNA, 38 bp, Artificial Sequence
  primer
gtaaaacgacggccagttccactcgcacgtgattacag

SEQ ID NO: 99583 - DNA, 24 bp, Artificial Sequence
  primer
ttctttgaattctttccagagaca

SEQ ID NO: 99584 - DNA, 41 bp, Artificial Sequence
  primer
gtaaaacgacggccagttctcatgtgccatttagatttctg

SEQ ID NO: 99585 - DNA, 38 bp, Artificial Sequence
  primer
gtaaaacgacggccagttgtcttccatgaaactggtcc

SEQ ID NO: 99586 - DNA, 42 bp, Artificial Sequence
  primer
gtaaaacgacggccagtcaagagaattgctgagaaagttagc

SEQ ID NO: 99587 - DNA, 22 bp, Artificial Sequence
  primer
aatgaacacagattctcatggc

SEQ ID NO: 99588 - DNA, 21 bp, Artificial Sequence
  primer
gtgggagcaaagaggaagaag

SEQ ID NO: 99589 - DNA, 40 bp, Artificial Sequence
  primer
gtaaaacgacggccagtttccttaagtggcaatgtatgtg

SEQ ID NO: 99590 - DNA, 39 bp, Artificial Sequence
  primer
gtaaaacgacggccagtacacatctatgccaaggagttg

SEQ ID NO: 99591 - DNA, 38 bp, Artificial Sequence
  primer
gtaaaacgacggccagttctttggcagggtagaagcag

SEQ ID NO: 99592 - DNA, 20 bp, Artificial Sequence
  primer
cagtttccaagctgcaaagg

SEQ ID NO: 99593 - DNA, 24 bp, Artificial Sequence
  primer
ggatgaaataaatttcctgaggtg

SEQ ID NO: 99594 - DNA, 22 bp, Artificial Sequence
  primer
tttagaggaacaaccacgaacc

SEQ ID NO: 99595 - DNA, 37 bp, Artificial Sequence
  primer
gtaaaacgacggccagtcccagcaaagaactccagtc

SEQ ID NO: 99596 - DNA, 21 bp, Artificial Sequence
  primer
tccttcattcatcaatttcgc

SEQ ID NO: 99597 - DNA, 19 bp, Artificial Sequence
  primer
tgggcaacaagagcgaaac

SEQ ID NO: 99598 - DNA, 20 bp, Artificial Sequence
  primer
attgcaccattgcattccag

SEQ ID NO: 99599 - DNA, 22 bp, Artificial Sequence
  primer
tgagacaatccagctctcactc

SEQ ID NO: 99600 - DNA, 21 bp, Artificial Sequence
  primer
cagatacatcacgccaagcag

SEQ ID NO: 99601 - DNA, 38 bp, Artificial Sequence
  primer
gtaaaacgacggccagtgtgcaccactacacccaacag

SEQ ID NO: 99602 - DNA, 21 bp, Artificial Sequence
  primer
tacctgccacttcatctaggc

SEQ ID NO: 99603 - DNA, 42 bp, Artificial Sequence
  primer
gtaaaacgacggccagtaaggcagctatttctagttcaaagc

SEQ ID NO: 99604 - DNA, 39 bp, Artificial Sequence
  primer
gtaaaacgacggccagttggtcaccttaatactgcctgg

SEQ ID NO: 99605 - DNA, 21 bp, Artificial Sequence
  primer
atttatcagacaggcccaagc

SEQ ID NO: 99606 - DNA, 20 bp, Artificial Sequence
  primer
aggtaatccacctgtctcgg

SEQ ID NO: 99607 - DNA, 40 bp, Artificial Sequence
  primer
gtaaaacgacggccagttggatctacgctgtaaggaaatg

SEQ ID NO: 99608 - DNA, 38 bp, Artificial Sequence
  primer
gtaaaacgacggccagttcttgagagcaggatgtctcc

SEQ ID NO: 99609 - DNA, 41 bp, Artificial Sequence
  primer
gtaaaacgacggccagtcaataacatgaattcagacagcaa

SEQ ID NO: 99610 - DNA, 42 bp, Artificial Sequence
  primer
gtaaaacgacggccagtgcaaacttcagattatttcataggg

SEQ ID NO: 99611 - DNA, 40 bp, Artificial Sequence
  primer
gtaaaacgacggccagtgataagtagggaaggtaccgtga

SEQ ID NO: 99612 - DNA, 38 bp, Artificial Sequence
  primer
gtaaaacgacggccagtctgagtggtgcctgtatcacc

SEQ ID NO: 99613 - DNA, 39 bp, Artificial Sequence
  primer
gtaaaacgacggccagtacagttgagaggacaggaaacc

SEQ ID NO: 99614 - DNA, 21 bp, Artificial Sequence
  primer
gttacaggacaggctgtgagc

SEQ ID NO: 99615 - DNA, 21 bp, Artificial Sequence
  primer
ttacaaagggcacatttcacg

SEQ ID NO: 99616 - DNA, 38 bp, Artificial Sequence
  primer
gtaaaacgacggccagttatgaaacactgcctgcatcc

SEQ ID NO: 99617 - DNA, 39 bp, Artificial Sequence
  primer
gtaaaacgacggccagttgcctaggaagttgacttacgg

SEQ ID NO: 99618 - DNA, 24 bp, Artificial Sequence
  primer
tgtctttcttagctccaattcctc

SEQ ID NO: 99619 - DNA, 21 bp, Artificial Sequence
  primer
tgcatgactgatagcactgcc

SEQ ID NO: 99620 - DNA, 21 bp, Artificial Sequence
  primer
tggaccttcggaaagcatatc

SEQ ID NO: 99621 - DNA, 21 bp, Artificial Sequence
  primer
ctccatctcaatcacccgaag

SEQ ID NO: 99622 - DNA, 21 bp, Artificial Sequence
  primer
tggatatagcaatgggaaggc

SEQ ID NO: 99623 - DNA, 38 bp, Artificial Sequence
  primer
gtaaaacgacggccagtgtcaagcaggtcaagatgcag

SEQ ID NO: 99624 - DNA, 40 bp, Artificial Sequence
  primer
gtaaaacgacggccagttgtatacactaggcctgctgagg

SEQ ID NO: 99625 - DNA, 37 bp, Artificial Sequence
  primer
gtaaaacgacggccagtctatcccacactgtcagccc

SEQ ID NO: 99626 - DNA, 38 bp, Artificial Sequence
  primer
gtaaaacgacggccagttgagaagagtggattcctggc

SEQ ID NO: 99627 - DNA, 21 bp, Artificial Sequence
  primer
aaatgaatgtggctgtgttcc

SEQ ID NO: 99628 - DNA, 37 bp, Artificial Sequence
  primer
gtaaaacgacggccagtgaccttgtgatccgcctacc

SEQ ID NO: 99629 - DNA, 40 bp, Artificial Sequence
  primer
gtaaaacgacggccagtgacaccaaagctcaaggactaac

SEQ ID NO: 99630 - DNA, 21 bp, Artificial Sequence
  primer
tcaacagtggctgtgtaaggc

SEQ ID NO: 99631 - DNA, 25 bp, Artificial Sequence
  primer
ttctcacaaattaagatttcttgcc

SEQ ID NO: 99632 - DNA, 41 bp, Artificial Sequence
  primer
gtaaaacgacggccagtaacagacaactactctcctgctcc

SEQ ID NO: 99633 - DNA, 21 bp, Artificial Sequence
  primer
tggtggtgcacacctttagtc

SEQ ID NO: 99634 - DNA, 38 bp, Artificial Sequence
  primer
gtaaaacgacggccagtcccaaggaattccaagtatgc

SEQ ID NO: 99635 - DNA, 21 bp, Artificial Sequence
  primer
tcctgtgagagccctatcctc

SEQ ID NO: 99636 - DNA, 38 bp, Artificial Sequence
  primer
gtaaaacgacggccagtttacacttcaaattggcccag

SEQ ID NO: 99637 - DNA, 39 bp, Artificial Sequence
  primer
gtaaaacgacggccagtcaactggctgagttaagaaggc

SEQ ID NO: 99638 - DNA, 22 bp, Artificial Sequence
  primer
aaactgaagctcagtgaggcac

SEQ ID NO: 99639 - DNA, 21 bp, Artificial Sequence
  primer
ccgaagtttcctgtgactgag

SEQ ID NO: 99640 - DNA, 38 bp, Artificial Sequence
  primer
gtaaaacgacggccagtccatgtctcaatggcaatacc

SEQ ID NO: 99641 - DNA, 38 bp, Artificial Sequence
  primer
gtaaaacgacggccagtaccttcagaattcttcctggg

SEQ ID NO: 99642 - DNA, 37 bp, Artificial Sequence
  primer
gtaaaacgacggccagtacaccaagcaaggaacatgg

SEQ ID NO: 99643 - DNA, 38 bp, Artificial Sequence
  primer
gtaaaacgacggccagtagtcaggactcaaccctggtc

SEQ ID NO: 99644 - DNA, 21 bp, Artificial Sequence
  primer
catcccaaatgccagataagg

SEQ ID NO: 99645 - DNA, 39 bp, Artificial Sequence
  primer
gtaaaacgacggccagttgtctgaagaatggtttcatgg

SEQ ID NO: 99646 - DNA, 21 bp, Artificial Sequence
  primer
acggccactacaactgaggtc

SEQ ID NO: 99647 - DNA, 23 bp, Artificial Sequence
  primer
caatattgaaataggcctcagaa

SEQ ID NO: 99648 - DNA, 38 bp, Artificial Sequence
  primer
gtaaaacgacggccagtgctaacgctttgcacttcact

SEQ ID NO: 99649 - DNA, 25 bp, Artificial Sequence
  primer
gagaacaatgagctcctacattacc

SEQ ID NO: 99650 - DNA, 36 bp, Artificial Sequence
  primer
gtaaaacgacggccagtctggtccagcaagcgagag

SEQ ID NO: 99651 - DNA, 18 bp, Artificial Sequence
  primer
gtccgagagacccgatcc

SEQ ID NO: 99652 - DNA, 21 bp, Artificial Sequence
  primer
tctggaaccctggagtggtag

SEQ ID NO: 99653 - DNA, 21 bp, Artificial Sequence
  primer
ctctcctgctaggctgctgtg

SEQ ID NO: 99654 - DNA, 37 bp, Artificial Sequence
  primer
gtaaaacgacggccagtcagagagcatctcccagcac

SEQ ID NO: 99655 - DNA, 20 bp, Artificial Sequence
  primer
accactatcacatgccaccc

SEQ ID NO: 99656 - DNA, 21 bp, Artificial Sequence
  primer
caatgatacctcctgctcacg

SEQ ID NO: 99657 - DNA, 39 bp, Artificial Sequence
  primer
gtaaaacgacggccagtcatgcacagcatttcttgtttc

SEQ ID NO: 99658 - DNA, 22 bp, Artificial Sequence
  primer
caccatctcatttattgctggc

SEQ ID NO: 99659 - DNA, 38 bp, Artificial Sequence
  primer
gtaaaacgacggccagtggcatagtcacaaatctgggc

SEQ ID NO: 99660 - DNA, 20 bp, Artificial Sequence
  primer
tacagcaccgcgatgtcttc

SEQ ID NO: 99661 - DNA, 21 bp, Artificial Sequence
  primer
gctcacgcattcgtctgttac

SEQ ID NO: 99662 - DNA, 38 bp, Artificial Sequence
  primer
gtaaaacgacggccagtgaacaaatccagaggaggtgg

SEQ ID NO: 99663 - DNA, 20 bp, Artificial Sequence
  primer
gcaacaagagcaactccgtc

SEQ ID NO: 99664 - DNA, 38 bp, Artificial Sequence
  primer
gtaaaacgacggccagtctgagacaggcctttgcattc

SEQ ID NO: 99665 - DNA, 21 bp, Artificial Sequence
  primer
ctgtgtcacaaggctcacctc

SEQ ID NO: 99666 - DNA, 38 bp, Artificial Sequence
  primer
gtaaaacgacggccagtcacaggtctcgtggtgatgag

SEQ ID NO: 99667 - DNA, 38 bp, Artificial Sequence
  primer
gtaaaacgacggccagtgaggtcggactcctcaaacag

SEQ ID NO: 99668 - DNA, 21 bp, Artificial Sequence
  primer
ctggtttaccaggccaaagag

SEQ ID NO: 99669 - DNA, 38 bp, Artificial Sequence
  primer
gtaaaacgacggccagtcatatcaaggtgtcggccttc

SEQ ID NO: 99670 - DNA, 38 bp, Artificial Sequence
  primer
gtaaaacgacggccagtaagagatgagaggaggcaagc

SEQ ID NO: 99671 - DNA, 22 bp, Artificial Sequence
  primer
ctggtcctgaagatctttctcc

SEQ ID NO: 99672 - DNA, 38 bp, Artificial Sequence
  primer
gtaaaacgacggccagtaaacactcactgaccgcaatg

SEQ ID NO: 99673 - DNA, 38 bp, Artificial Sequence
  primer
gtaaaacgacggccagttctgcctgaccaaagtaaccc

SEQ ID NO: 99674 - DNA, 23 bp, Artificial Sequence
  primer
catgatcctgtaacaaggcaaac

SEQ ID NO: 99675 - DNA, 21 bp, Artificial Sequence
  primer
caggcccaacctaatcttgag

SEQ ID NO: 99676 - DNA, 38 bp, Artificial Sequence
  primer
gtaaaacgacggccagtatcacagagctgtggtcttgg

SEQ ID NO: 99677 - DNA, 37 bp, Artificial Sequence
  primer
gtaaaacgacggccagttcgtcaggaacgtcaagtcc

SEQ ID NO: 99678 - DNA, 36 bp, Artificial Sequence
  primer
gtaaaacgacggccagttcctctgcagacctcaggc

SEQ ID NO: 99679 - DNA, 38 bp, Artificial Sequence
  primer
gtaaaacgacggccagtcccatgatcccaaagctagtg

SEQ ID NO: 99680 - DNA, 21 bp, Artificial Sequence
  primer
cggctcaggtcttctctgttc

SEQ ID NO: 99681 - DNA, 38 bp, Artificial Sequence
  primer
gtaaaacgacggccagtggttccatccctgtcaatgtc

SEQ ID NO: 99682 - DNA, 20 bp, Artificial Sequence
  primer
atgacaatggcagtgggaag

SEQ ID NO: 99683 - DNA, 21 bp, Artificial Sequence
  primer
acaaacacaaacggagcaatg

SEQ ID NO: 99684 - DNA, 38 bp, Artificial Sequence
  primer
gtaaaacgacggccagtggctcctgatacatgctgatg

SEQ ID NO: 99685 - DNA, 20 bp, Artificial Sequence
  primer
agagccacgcagacacaaag

SEQ ID NO: 99686 - DNA, 38 bp, Artificial Sequence
  primer
gtaaaacgacggccagtgtaaccagacagcctaagggc

SEQ ID NO: 99687 - DNA, 21 bp, Artificial Sequence
  primer
caccactgctcacaaatagcg

SEQ ID NO: 99688 - DNA, 20 bp, Artificial Sequence
  primer
gctgtgggaagggtcctaac

SEQ ID NO: 99689 - DNA, 38 bp, Artificial Sequence
  primer
gtaaaacgacggccagtggacggtacacccagatgaag

SEQ ID NO: 99690 - DNA, 21 bp, Artificial Sequence
  primer
cccaggcaatagagacagacc

SEQ ID NO: 99691 - DNA, 24 bp, Artificial Sequence
  primer
cctgtctctgtcacattgtagctg

SEQ ID NO: 99692 - DNA, 21 bp, Artificial Sequence
  primer
tgtgtttgaggaacagcaagg

SEQ ID NO: 99693 - DNA, 39 bp, Artificial Sequence
  primer
gtaaaacgacggccagtcagagtctgtgaactgtctgcg

SEQ ID NO: 99694 - DNA, 37 bp, Artificial Sequence
  primer
gtaaaacgacggccagtccagcaggtgtgactcagtg

SEQ ID NO: 99695 - DNA, 20 bp, Artificial Sequence
  primer
cctgctagagcgtcaggaag

SEQ ID NO: 99696 - DNA, 21 bp, Artificial Sequence
  primer
ccagcgtgaggctgtattagg

SEQ ID NO: 99697 - DNA, 38 bp, Artificial Sequence
  primer
gtaaaacgacggccagtagtgaggtgaccatcccacag

SEQ ID NO: 99698 - DNA, 38 bp, Artificial Sequence
  primer
gtaaaacgacggccagtgacccacagatacccaagcac

SEQ ID NO: 99699 - DNA, 21 bp, Artificial Sequence
  primer
ccaatgtgtcatctgcctcag

SEQ ID NO: 99700 - DNA, 21 bp, Artificial Sequence
  primer
atggagtgaggagagactggg

SEQ ID NO: 99701 - DNA, 22 bp, Artificial Sequence
  primer
tgggcccagtacaaagtcatac

SEQ ID NO: 99702 - DNA, 37 bp, Artificial Sequence
  primer
gtaaaacgacggccagtgagccagttactctgcaccc

SEQ ID NO: 99703 - DNA, 23 bp, Artificial Sequence
  primer
gggacacagaggtagatcagagg

SEQ ID NO: 99704 - DNA, 21 bp, Artificial Sequence
  primer
gacatgatggagaggaagctg

SEQ ID NO: 99705 - DNA, 20 bp, Artificial Sequence
  primer
tctcccgctgcattaaacac

SEQ ID NO: 99706 - DNA, 21 bp, Artificial Sequence
  primer
cttgttgcaccacttccaatc

SEQ ID NO: 99707 - DNA, 21 bp, Artificial Sequence
  primer
agcgatagagcagagaggagc

SEQ ID NO: 99708 - DNA, 38 bp, Artificial Sequence
  primer
gtaaaacgacggccagttaggtggcagagagggttcag

SEQ ID NO: 99709 - DNA, 37 bp, Artificial Sequence
  primer
gtaaaacgacggccagtggccacatgcaaccataaac

SEQ ID NO: 99710 - DNA, 21 bp, Artificial Sequence
  primer
cctgactatgacccaactccc

SEQ ID NO: 99711 - DNA, 38 bp, Artificial Sequence
  primer
gtaaaacgacggccagtccagtgtctgcaggatgtttc

SEQ ID NO: 99712 - DNA, 38 bp, Artificial Sequence
  primer
gtaaaacgacggccagtcctgctgtgtcatttggagac

SEQ ID NO: 99713 - DNA, 21 bp, Artificial Sequence
  primer
gcaggatgtactgtacctggg

SEQ ID NO: 99714 - DNA, 38 bp, Artificial Sequence
  primer
gtaaaacgacggccagtggctggaagttaagaggcaag

SEQ ID NO: 99715 - DNA, 21 bp, Artificial Sequence
  primer
gatggcaagacagagaaccag

SEQ ID NO: 99716 - DNA, 21 bp, Artificial Sequence
  primer
ctgcacataggtgattctgcc

SEQ ID NO: 99717 - DNA, 20 bp, Artificial Sequence
  primer
tggcctgctgaaagacagag

SEQ ID NO: 99718 - DNA, 20 bp, Artificial Sequence
  primer
aaattgtttgctgagccagg

SEQ ID NO: 99719 - DNA, 21 bp, Artificial Sequence
  primer
gagacacacaggcatggaaag

SEQ ID NO: 99720 - DNA, 21 bp, Artificial Sequence
  primer
agtccacttctgacaggaccc

SEQ ID NO: 99721 - DNA, 21 bp, Artificial Sequence
  primer
tggccaaacagaagcagactc

SEQ ID NO: 99722 - DNA, 21 bp, Artificial Sequence
  primer
ctctaaccgccttccagagac

SEQ ID NO: 99723 - DNA, 38 bp, Artificial Sequence
  primer
gtaaaacgacggccagtccttggagggaaagatgtctg

SEQ ID NO: 99724 - DNA, 38 bp, Artificial Sequence
  primer
gtaaaacgacggccagtgaggagataaccttcctgccc

SEQ ID NO: 99725 - DNA, 38 bp, Artificial Sequence
  primer
gtaaaacgacggccagttacggtactagaggcgcacag

SEQ ID NO: 99726 - DNA, 22 bp, Artificial Sequence
  primer
gaaactccataaccaccagcag

SEQ ID NO: 99727 - DNA, 21 bp, Artificial Sequence
  primer
gtggacaagtcaacacccaag

SEQ ID NO: 99728 - DNA, 39 bp, Artificial Sequence
  primer
gtaaaacgacggccagtgacaacattactccaactgccc

SEQ ID NO: 99729 - DNA, 21 bp, Artificial Sequence
  primer
acttcatgtaccaccaagccc

SEQ ID NO: 99730 - DNA, 19 bp, Artificial Sequence
  primer
cgcagggaagactcctcag

SEQ ID NO: 99731 - DNA, 38 bp, Artificial Sequence
  primer
gtaaaacgacggccagtagagaccatggagtgcaggtg

SEQ ID NO: 99732 - DNA, 21 bp, Artificial Sequence
  primer
tgctccatcatcacaagttgc

SEQ ID NO: 99733 - DNA, 21 bp, Artificial Sequence
  primer
ttaagctagagaggaagcccg

SEQ ID NO: 99734 - DNA, 21 bp, Artificial Sequence
  primer
tgggagatgaggactttccac

SEQ ID NO: 99735 - DNA, 22 bp, Artificial Sequence
  primer
ggtcctgaaatttgatgctgtc

SEQ ID NO: 99736 - DNA, 21 bp, Artificial Sequence
  primer
atggtgtggtggtggtgtaag

SEQ ID NO: 99737 - DNA, 38 bp, Artificial Sequence
  primer
gtaaaacgacggccagtttctaagccctgacctccatc

SEQ ID NO: 99738 - DNA, 21 bp, Artificial Sequence
  primer
acaagcaaatggttagcaccc

SEQ ID NO: 99739 - DNA, 19 bp, Artificial Sequence
  primer
ttgtcagcaccaaagccag

SEQ ID NO: 99740 - DNA, 21 bp, Artificial Sequence
  primer
tgtgggcactaccagttaagc

SEQ ID NO: 99741 - DNA, 21 bp, Artificial Sequence
  primer
cagtcccagaccagacacaac

SEQ ID NO: 99742 - DNA, 22 bp, Artificial Sequence
  primer
gcagattcctgattctgagctg

SEQ ID NO: 99743 - DNA, 38 bp, Artificial Sequence
  primer
gtaaaacgacggccagttgatgctgagagttctggtgg

SEQ ID NO: 99744 - DNA, 18 bp, Artificial Sequence
  primer
gaccctgccctgtgttcc

SEQ ID NO: 99745 - DNA, 21 bp, Artificial Sequence
  primer
ctccaagttagctgggaagcc

SEQ ID NO: 99746 - DNA, 38 bp, Artificial Sequence
  primer
gtaaaacgacggccagttaagtccagacccaatgcaag

SEQ ID NO: 99747 - DNA, 21 bp, Artificial Sequence
  primer
ctgcatagttatgcccacctg

SEQ ID NO: 99748 - DNA, 38 bp, Artificial Sequence
  primer
gtaaaacgacggccagtaaagtgcccttgtagccagtc

SEQ ID NO: 99749 - DNA, 38 bp, Artificial Sequence
  primer
gtaaaacgacggccagtgaagttcaggtcagtctgggc

SEQ ID NO: 99750 - DNA, 21 bp, Artificial Sequence
  primer
ctcctctcacgaatctccagg

SEQ ID NO: 99751 - DNA, 21 bp, Artificial Sequence
  primer
cgacggtagttgagcttgttg

SEQ ID NO: 99752 - DNA, 21 bp, Artificial Sequence
  primer
tcaccttgatatagcaggccc

SEQ ID NO: 99753 - DNA, 38 bp, Artificial Sequence
  primer
gtaaaacgacggccagttggttgaccaggtactcatgc

SEQ ID NO: 99754 - DNA, 38 bp, Artificial Sequence
  primer
gtaaaacgacggccagtaaatctcagagaggccaccac

SEQ ID NO: 99755 - DNA, 39 bp, Artificial Sequence
  primer
gtaaaacgacggccagtgaaacaaacaagcaaattcacg

SEQ ID NO: 99756 - DNA, 21 bp, Artificial Sequence
  primer
agccaaggaagagaatggatg

SEQ ID NO: 99757 - DNA, 21 bp, Artificial Sequence
  primer
agctcttgcctctgtctgacc

SEQ ID NO: 99758 - DNA, 36 bp, Artificial Sequence
  primer
gtaaaacgacggccagtcacccaccacgactcttcc

SEQ ID NO: 99759 - DNA, 22 bp, Artificial Sequence
  primer
gcctctaactccaccctctctc

SEQ ID NO: 99760 - DNA, 37 bp, Artificial Sequence
  primer
gtaaaacgacggccagtccttcgccaatgactgtgtc

SEQ ID NO: 99761 - DNA, 21 bp, Artificial Sequence
  primer
actctccagatgggaaaccac

SEQ ID NO: 99762 - DNA, 38 bp, Artificial Sequence
  primer
gtaaaacgacggccagtctcagtggaggcctaggattg

SEQ ID NO: 99763 - DNA, 38 bp, Artificial Sequence
  primer
gtaaaacgacggccagtatggtaaagtcgccctggtag

SEQ ID NO: 99764 - DNA, 18 bp, Artificial Sequence
  primer
atcttccagctcgcccag

SEQ ID NO: 99765 - DNA, 35 bp, Artificial Sequence
  primer
gtaaaacgacggccagtacgaagcgcaggtcactg

SEQ ID NO: 99766 - DNA, 21 bp, Artificial Sequence
  primer
gtgaacttgtcgttggcgtag

SEQ ID NO: 99767 - DNA, 18 bp, Artificial Sequence
  primer
gtgaccagggcggtgtag

SEQ ID NO: 99768 - DNA, 19 bp, Artificial Sequence
  primer
ttgatgcggaagccgttac

SEQ ID NO: 99769 - DNA, 36 bp, Artificial Sequence
  primer
gtaaaacgacggccagtgagatcgccagtccaggag

SEQ ID NO: 99770 - DNA, 37 bp, Artificial Sequence
  primer
gtaaaacgacggccagtgcatcccgaagtccgtagag

SEQ ID NO: 99771 - DNA, 21 bp, Artificial Sequence
  primer
tcaggtaatcccgaaggagtc

SEQ ID NO: 99772 - DNA, 37 bp, Artificial Sequence
  primer
gtaaaacgacggccagtgatgtcaccaagtgctgtcg

SEQ ID NO: 99773 - DNA, 38 bp, Artificial Sequence
  primer
gtaaaacgacggccagtgctgtctggagaagaaggagg

SEQ ID NO: 99774 - DNA, 21 bp, Artificial Sequence
  primer
ggagctcctgagcttctggtc

SEQ ID NO: 99775 - DNA, 25 bp, Artificial Sequence
  primer
ttacacgtatcatcttaccacttgc

SEQ ID NO: 99776 - DNA, 20 bp, Artificial Sequence
  primer
agtgatggccaatggtcaag

SEQ ID NO: 99777 - DNA, 21 bp, Artificial Sequence
  primer
tgtctcctttcctcccgatac

SEQ ID NO: 99778 - DNA, 18 bp, Artificial Sequence
  primer
gcactgggtcctaggcag

SEQ ID NO: 99779 - DNA, 21 bp, Artificial Sequence
  primer
gggaaattagggaaggcgtag

SEQ ID NO: 99780 - DNA, 20 bp, Artificial Sequence
  primer
ctgaaactgcgtcactgcac

SEQ ID NO: 99781 - DNA, 22 bp, Artificial Sequence
  primer
aatgggctttgtttcttcttcc

SEQ ID NO: 99782 - DNA, 21 bp, Artificial Sequence
  primer
aggccaatgggaacatgtaag

SEQ ID NO: 99783 - DNA, 21 bp, Artificial Sequence
  primer
tccaaagagtagctggcagtg

SEQ ID NO: 99784 - DNA, 39 bp, Artificial Sequence
  primer
gtaaaacgacggccagtttcatatccttcagcaagcctc

SEQ ID NO: 99785 - DNA, 21 bp, Artificial Sequence
  primer
cagacaaatgttggcacttcc

SEQ ID NO: 99786 - DNA, 23 bp, Artificial Sequence
  primer
aaagagtggtaggaaggaagacg

SEQ ID NO: 99787 - DNA, 38 bp, Artificial Sequence
  primer
gtaaaacgacggccagtccagctacattctcaggaggg

SEQ ID NO: 99788 - DNA, 20 bp, Artificial Sequence
  primer
tctcacttcctgggcaacag

SEQ ID NO: 99789 - DNA, 20 bp, Artificial Sequence
  primer
ggtacatgctccctcattgc

SEQ ID NO: 99790 - DNA, 21 bp, Artificial Sequence
  primer
cagaataaacgctgaggaccc

SEQ ID NO: 99791 - DNA, 25 bp, Artificial Sequence
  primer
gaaagacacgaatcctataattggg

SEQ ID NO: 99792 - DNA, 20 bp, Artificial Sequence
  primer
gacgacagggcaagactgtg

SEQ ID NO: 99793 - DNA, 40 bp, Artificial Sequence
  primer
gtaaaacgacggccagttttgtattcggtctctccttctg

SEQ ID NO: 99794 - DNA, 39 bp, Artificial Sequence
  primer
gtaaaacgacggccagttcacatcagttgcctcctctaa

SEQ ID NO: 99795 - DNA, 37 bp, Artificial Sequence
  primer
gtaaaacgacggccagtcccagcctgatttctgtctt

SEQ ID NO: 99796 - DNA, 21 bp, Artificial Sequence
  primer
ttagttcatagggcctttggc

SEQ ID NO: 99797 - DNA, 40 bp, Artificial Sequence
  primer
gtaaaacgacggccagttccacataaactcagaggagcag

SEQ ID NO: 99798 - DNA, 39 bp, Artificial Sequence
  primer
gtaaaacgacggccagttgtgatgcatggtataaggacc

SEQ ID NO: 99799 - DNA, 19 bp, Artificial Sequence
  primer
atggctccatttgctgtcc

SEQ ID NO: 99800 - DNA, 37 bp, Artificial Sequence
  primer
gtaaaacgacggccagttgctcttcaccaggatttcg

SEQ ID NO: 99801 - DNA, 24 bp, Artificial Sequence
  primer
ttcccaggtaattgtcacatacag

SEQ ID NO: 99802 - DNA, 21 bp, Artificial Sequence
  primer
ttctataggtgcagtttgcgg

SEQ ID NO: 99803 - DNA, 40 bp, Artificial Sequence; identical to SEQ ID NO: 99797
  primer

SEQ ID NO: 99804 - DNA, 21 bp, Artificial Sequence
  primer
ctgggtctccctgtctttcac

SEQ ID NO: 99805 - DNA, 37 bp, Artificial Sequence
  primer
gtaaaacgacggccagtctggtctactcggatctgcc

SEQ ID NO: 99806 - DNA, 19 bp, Artificial Sequence
  primer
cccactcctggactcgaac

SEQ ID NO: 99807 - DNA, 38 bp, Artificial Sequence
  primer
gtaaaacgacggccagtcctgagcagtctcctctcctc

SEQ ID NO: 99808 - DNA, 21 bp, Artificial Sequence
  primer
tccagcctaaagtgcttggag

SEQ ID NO: 99809 - DNA, 38 bp, Artificial Sequence
  primer
gtaaaacgacggccagtcacattaacgttcagcgaagc

SEQ ID NO: 99810 - DNA, 38 bp, Artificial Sequence
  primer
gtaaaacgacggccagttttccaatgacaggcagtgag

SEQ ID NO: 99811 - DNA, 26 bp, Artificial Sequence
  primer
ccacatgccataatatatcgttactc

SEQ ID NO: 99812 - DNA, 38 bp, Artificial Sequence
  primer
gtaaaacgacggccagtacataccctccctgtacccag

SEQ ID NO: 99813 - DNA, 38 bp, Artificial Sequence
  primer
gtaaaacgacggccagtgccataaaggtcatgaaacca

SEQ ID NO: 99814 - DNA, 21 bp, Artificial Sequence
  primer
gttcatggcacgtcactaagg

SEQ ID NO: 99815 - DNA, 21 bp, Artificial Sequence
  primer
gactaagtgggtgtcagtgcc

SEQ ID NO: 99816 - DNA, 21 bp, Artificial Sequence
  primer
tgtgttcagagcttgtgggac

SEQ ID NO: 99817 - DNA, 20 bp, Artificial Sequence
  primer
gaattccaaccgcaattctg

SEQ ID NO: 99818 - DNA, 39 bp, Artificial Sequence
  primer
gtaaaacgacggccagtagtcctggtgacacagtccttc

SEQ ID NO: 99819 - DNA, 21 bp, Artificial Sequence
  primer
tgagcaaggattcacatccag

SEQ ID NO: 99820 - DNA, 21 bp, Artificial Sequence
  primer
gcagggtaggaggaacatgag

SEQ ID NO: 99821 - DNA, 38 bp, Artificial Sequence
  primer
gtaaaacgacggccagtgccaatctgccttgaatcttg

SEQ ID NO: 99822 - DNA, 20 bp, Artificial Sequence
  primer
gaccggcaaggaagctttac

SEQ ID NO: 99823 - DNA, 25 bp, Artificial Sequence
  primer
cctctcctccaagaaatgtactagc

SEQ ID NO: 99824 - DNA, 38 bp, Artificial Sequence
  primer
gtaaaacgacggccagttctgcatggaaactgaaggtg

SEQ ID NO: 99825 - DNA, 22 bp, Artificial Sequence
  primer
caatgaagggaaatgactgtcc

SEQ ID NO: 99826 - DNA, 21 bp, Artificial Sequence
  primer
aatccacagtgggaattgagg

SEQ ID NO: 99827 - DNA, 21 bp, Artificial Sequence
  primer
gctatgcctcccaaatcagac

SEQ ID NO: 99828 - DNA, 38 bp, Artificial Sequence
  primer
gtaaaacgacggccagtacaggtgagacaaggtcctgc

SEQ ID NO: 99829 - DNA, 21 bp, Artificial Sequence
  primer
tccagcctgagagactgagac

SEQ ID NO: 99830 - DNA, 21 bp, Artificial Sequence
  primer
aggtgcagcctgaatttgaac

SEQ ID NO: 99831 - DNA, 38 bp, Artificial Sequence
  primer
gtaaaacgacggccagtccagtgcagcagattatcgtc

SEQ ID NO: 99832 - DNA, 38 bp, Artificial Sequence
  primer
gtaaaacgacggccagtatgggcaagaacaacattcag

SEQ ID NO: 99833 - DNA, 38 bp, Artificial Sequence
  primer
gtaaaacgacggccagtcatccactcatttccatgcag

SEQ ID NO: 99834 - DNA, 38 bp, Artificial Sequence
  primer
gtaaaacgacggccagtaatggttctgtgtccctgtcc

SEQ ID NO: 99835 - DNA, 19 bp, Artificial Sequence
  primer
gacctcgtgatccacccac

SEQ ID NO: 99836 - DNA, 38 bp, Artificial Sequence
  primer
gtaaaacgacggccagtcttctttgggccagaacaatc

SEQ ID NO: 99837 - DNA, 21 bp, Artificial Sequence
  primer
actagcagcttccctccactg

SEQ ID NO: 99838 - DNA, 21 bp, Artificial Sequence
  primer
cgaattcatctccctctgagc

SEQ ID NO: 99839 - DNA, 21 bp, Artificial Sequence
  primer
gcctggctctcactactctgc

SEQ ID NO: 99840 - DNA, 38 bp, Artificial Sequence
  primer
gtaaaacgacggccagtctctctcaaacacgcctctcc

SEQ ID NO: 99841 - DNA, 23 bp, Artificial Sequence
  primer
catattgggaaatctcaacaacc

SEQ ID NO: 99842 - DNA, 21 bp, Artificial Sequence
  primer
aagtgtctgggtttgttgctg

SEQ ID NO: 99843 - DNA, 21 bp, Artificial Sequence
  primer
agcgctgggtgactaattctg

SEQ ID NO: 99844 - DNA, 38 bp, Artificial Sequence
  primer
gtaaaacgacggccagtataagcaagtgatggtctggc

SEQ ID NO: 99845 - DNA, 21 bp, Artificial Sequence
  primer
ctttggtccagcaagaaatgg

SEQ ID NO: 99846 - DNA, 22 bp, Artificial Sequence
  primer
caacagaaggaatttcaccagg

SEQ ID NO: 99847 - DNA, 38 bp, Artificial Sequence
  primer
gtaaaacgacggccagtcactccagctccatcaaacag

SEQ ID NO: 99848 - DNA, 21 bp, Artificial Sequence
  primer
tgctcgaaagctgacttgttc

SEQ ID NO: 99849 - DNA, 38 bp, Artificial Sequence
  primer
gtaaaacgacggccagttggaatttctaagggtgagcc

SEQ ID NO: 99850 - DNA, 21 bp, Artificial Sequence
  primer
cttcttcaagctgcaagttcg

SEQ ID NO: 99851 - DNA, 21 bp, Artificial Sequence
  primer
gttcagtgttggaacccttgg

SEQ ID NO: 99852 - DNA, 20 bp, Artificial Sequence
  primer
cctgtccacaactctcaggc

SEQ ID NO: 99853 - DNA, 38 bp, Artificial Sequence
  primer
gtaaaacgacggccagtttcaagggcctagacacacag

SEQ ID NO: 99854 - DNA, 21 bp, Artificial Sequence
  primer
aggagacagggagtatgtggg

SEQ ID NO: 99855 - DNA, 38 bp, Artificial Sequence
  primer
gtaaaacgacggccagtaagtaatctgccctcctcagc

SEQ ID NO: 99856 - DNA, 36 bp, Artificial Sequence
  primer
gtaaaacgacggccagtagtggtgtccactgagcca

SEQ ID NO: 99857 - DNA, 21 bp, Artificial Sequence
  primer
atgggccataaacgaagacac

SEQ ID NO: 99858 - DNA, 38 bp, Artificial Sequence
  primer
gtaaaacgacggccagttcttgagctcccaacttcagg

SEQ ID NO: 99859 - DNA, 21 bp, Artificial Sequence
  primer
aaactcacagcttcaacaggg

SEQ ID NO: 99860 - DNA, 38 bp, Artificial Sequence
  primer
gtaaaacgacggccagtaactcagaagaaacatccggc

SEQ ID NO: 99861 - DNA, 21 bp, Artificial Sequence
  primer
tagcaggtggaatcttcaggg

SEQ ID NO: 99862 - DNA, 38 bp, Artificial Sequence
  primer
gtaaaacgacggccagtaaccacgcaaatcccagttac

SEQ ID NO: 99863 - DNA, 38 bp, Artificial Sequence
  primer
gtaaaacgacggccagtctcagagagagagcctgaggg

SEQ ID NO: 99864 - DNA, 38 bp, Artificial Sequence
  primer
gtaaaacgacggccagtgaacataagcacggtcacgtc

SEQ ID NO: 99865 - DNA, 21 bp, Artificial Sequence
  primer
ctggaagggaactgaatctgg

SEQ ID NO: 99866 - DNA, 21 bp, Artificial Sequence
  primer
ttgaaggtcaaatcaacgagc

SEQ ID NO: 99867 - DNA, 38 bp, Artificial Sequence
  primer
gtaaaacgacggccagtacagtgcactttccacactgg

SEQ ID NO: 99868 - DNA, 21 bp, Artificial Sequence
  primer
aattctgtaaaggcaggcgag

SEQ ID NO: 99869 - DNA, 21 bp, Artificial Sequence
  primer
ctccatgtaccctcctccaac

SEQ ID NO: 99870 - DNA, 37 bp, Artificial Sequence; identical to SEQ ID NO: 5320
  primer

SEQ ID NO: 99871 - DNA, 38 bp, Artificial Sequence
  primer
gtaaaacgacggccagtaagttaggaaggaacatgcgg

SEQ ID NO: 99872 - DNA, 19 bp, Artificial Sequence
  primer
cgcagatcgcaaacaaatg

SEQ ID NO: 99873 - DNA, 26 bp, Artificial Sequence
  primer
caaagtctgaattacagtcatggagt

SEQ ID NO: 99874 - DNA, 21 bp, Artificial Sequence
  primer
cccatcagcagagttccatag

SEQ ID NO: 99875 - DNA, 21 bp, Artificial Sequence
  primer
aaggacactgggtaatgcacc

SEQ ID NO: 99876 - DNA, 21 bp, Artificial Sequence
  primer
tggtggctttattcctccatc

SEQ ID NO: 99877 - DNA, 38 bp, Artificial Sequence
  primer
gtaaaacgacggccagtgttggcccgtctctttgtaag

SEQ ID NO: 99878 - DNA, 38 bp, Artificial Sequence
  primer
gtaaaacgacggccagtctgggagttgttaaacctggc

SEQ ID NO: 99879 - DNA, 38 bp, Artificial Sequence
  primer
gtaaaacgacggccagtaatctcggaagtgctggtttg

SEQ ID NO: 99880 - DNA, 38 bp, Artificial Sequence
  primer
gtaaaacgacggccagttaattcacgccgaagaagttg

SEQ ID NO: 99881 - DNA, 18 bp, Artificial Sequence
  primer
gaaagggctggaaggagg

SEQ ID NO: 99882 - DNA, 38 bp, Artificial Sequence
  primer
gtaaaacgacggccagtaagtccgagaagcagtcgaac

SEQ ID NO: 99883 - DNA, 38 bp, Artificial Sequence
  primer
gtaaaacgacggccagtagtgaagccaaactgtcctcc

SEQ ID NO: 99884 - DNA, 21 bp, Artificial Sequence
  primer
gtgatctccaggactcaaacg

SEQ ID NO: 99885 - DNA, 38 bp, Artificial Sequence
  primer
gtaaaacgacggccagtaatagctccctctcagggtgg

SEQ ID NO: 99886 - DNA, 21 bp, Artificial Sequence
  primer
catatgtgcagagagccaacc

SEQ ID NO: 99887 - DNA, 21 bp, Artificial Sequence
  primer
gcataaagggagtgtgacctg

SEQ ID NO: 99888 - DNA, 38 bp, Artificial Sequence
  primer
gtaaaacgacggccagtcacacctgcctctatcacctg

SEQ ID NO: 99889 - DNA, 21 bp, Artificial Sequence
  primer
taaggccttcctccaaatcag

SEQ ID NO: 99890 - DNA, 21 bp, Artificial Sequence
  primer
tctggagaggtctgtgtttgc

SEQ ID NO: 99891 - DNA, 38 bp, Artificial Sequence
  primer
gtaaaacgacggccagtgcagacatgaaccacaactgg

SEQ ID NO: 99892 - DNA, 21 bp, Artificial Sequence
  primer
tgctgtatttcccagagtccc

SEQ ID NO: 99893 - DNA, 20 bp, Artificial Sequence
  primer
aaacacaaggaggccctgag

SEQ ID NO: 99894 - DNA, 20 bp, Artificial Sequence
  primer
tcaggaaatgtttcccaagc

SEQ ID NO: 99895 - DNA, 21 bp, Artificial Sequence
  primer
aaaggtaaaccctgcagatgg

SEQ ID NO: 99896 - DNA, 20 bp, Artificial Sequence
  primer
actgcattgtgggttatggg

SEQ ID NO: 99897 - DNA, 21 bp, Artificial Sequence
  primer
caacttgctacacagccttgg

SEQ ID NO: 99898 - DNA, 20 bp, Artificial Sequence
  primer
aggtgggatgaggtctgtcc

SEQ ID NO: 99899 - DNA, 38 bp, Artificial Sequence
  primer
gtaaaacgacggccagtaggtgtccctccctctctagg

SEQ ID NO: 99900 - DNA, 38 bp, Artificial Sequence
  primer
gtaaaacgacggccagtattctctccctgttggtgcag

SEQ ID NO: 99901 - DNA, 38 bp, Artificial Sequence
  primer
gtaaaacgacggccagtcaaagtttccaggcagactcc

SEQ ID NO: 99902 - DNA, 18 bp, Artificial Sequence
  primer
cagcctgggatcacctcc

SEQ ID NO: 99903 - DNA, 21 bp, Artificial Sequence
  primer
gcaggacctatctcgggtatg

SEQ ID NO: 99904 - DNA, 39 bp, Artificial Sequence
  primer
gtaaaacgacggccagtcctatatcctcccaagctctcg

SEQ ID NO: 99905 - DNA, 21 bp, Artificial Sequence
  primer
agggactgagatcgtttcgag

SEQ ID NO: 99906 - DNA, 21 bp, Artificial Sequence
  primer
ccactctagaagctggcatgg

SEQ ID NO: 99907 - DNA, 21 bp, Artificial Sequence
  primer
accgaagggccactatttacc

SEQ ID NO: 99908 - DNA, 20 bp, Artificial Sequence
  primer
tccacaaggccaagaatgag

SEQ ID NO: 99909 - DNA, 21 bp, Artificial Sequence
  primer
atgctgcaccatccaataaag

SEQ ID NO: 99910 - DNA, 25 bp, Artificial Sequence
  primer
tcttcagttagtaacaaatgcggag

SEQ ID NO: 99911 - DNA, 38 bp, Artificial Sequence
  primer
gtaaaacgacggccagtacactgctggtgtttacaggc

SEQ ID NO: 99912 - DNA, 22 bp, Artificial Sequence
  primer
tctttgggctgagctgatctac

SEQ ID NO: 99913 - DNA, 38 bp, Artificial Sequence
  primer
gtaaaacgacggccagttctcttccgaggtttctttgg

SEQ ID NO: 99914 - DNA, 39 bp, Artificial Sequence
  primer
gtaaaacgacggccagtgaatgaagcagtgtatctcgca

SEQ ID NO: 99915 - DNA, 38 bp, Artificial Sequence
  primer
gtaaaacgacggccagttataatgcaatccttgcagcc

SEQ ID NO: 99916 - DNA, 18 bp, Artificial Sequence
  primer
acatgggttggaggaggg

SEQ ID NO: 99917 - DNA, 19 bp, Artificial Sequence
  primer
caccatgcccgtactgaaa

SEQ ID NO: 99918 - DNA, 38 bp, Artificial Sequence
  primer
gtaaaacgacggccagtgtacatggccaactccagacc

SEQ ID NO: 99919 - DNA, 37 bp, Artificial Sequence
  primer
gtaaaacgacggccagtagtgggatgtctaggccagg

SEQ ID NO: 99920 - DNA, 21 bp, Artificial Sequence
  primer
tttcaaatcctgcttgttccc

SEQ ID NO: 99921 - DNA, 20 bp, Artificial Sequence
  primer
agctcttcctccagtctccg

SEQ ID NO: 99922 - DNA, 21 bp, Artificial Sequence
  primer
gctcttggacaggagggactc

SEQ ID NO: 99923 - DNA, 38 bp, Artificial Sequence
  primer
gtaaaacgacggccagttgaccgagtatgcaaccaaac

SEQ ID NO: 99924 - DNA, 39 bp, Artificial Sequence
  primer
gtaaaacgacggccagttgcacacgcaattcatttagac

SEQ ID NO: 99925 - DNA, 37 bp, Artificial Sequence
  primer
gtaaaacgacggccagtaatgccttggtgttcaggtg

SEQ ID NO: 99926 - DNA, 19 bp, Artificial Sequence
  primer
atgatgtacgggtggcctg

SEQ ID NO: 99927 - DNA, 37 bp, Artificial Sequence
  primer
gtaaaacgacggccagtcgagctcagcacgtagttgg

SEQ ID NO: 99928 - DNA, 18 bp, Artificial Sequence
  primer
gcagataagagcgcgacg

SEQ ID NO: 99929 - DNA, 20 bp, Artificial Sequence
  primer
ctcctcctcctcctcctcct

SEQ ID NO: 99930 - DNA, 38 bp, Artificial Sequence
  primer
gtaaaacgacggccagtgcagacggagaagagggtatg

SEQ ID NO: 99931 - DNA, 35 bp, Artificial Sequence
  primer
gtaaaacgacggccagtagcgttggagacgtcgaa

SEQ ID NO: 99932 - DNA, 21 bp, Artificial Sequence
  primer
cggaagtctctacagcaaggc

SEQ ID NO: 99933 - DNA, 20 bp, Artificial Sequence
  primer
actcagccaagttgaagccc

SEQ ID NO: 99934 - DNA, 21 bp, Artificial Sequence
  primer
gggtggagtaagctaggcgag

SEQ ID NO: 99935 - DNA, 21 bp, Artificial Sequence
  primer
gcaattcagggaatctgaacc

SEQ ID NO: 99936 - DNA, 21 bp, Artificial Sequence
  primer
ctggtggaggagcgagtaaac

SEQ ID NO: 99937 - DNA, 21 bp, Artificial Sequence
  primer
tttgatcttggcatcaaggag

SEQ ID NO: 99938 - DNA, 19 bp, Artificial Sequence
  primer
ggtcgggagagactgcttg

SEQ ID NO: 99939 - DNA, 37 bp, Artificial Sequence
  primer
gtaaaacgacggccagtaattcgatgatgcctctccc

SEQ ID NO: 99940 - DNA, 38 bp, Artificial Sequence
  primer
gtaaaacgacggccagtggcaataagggttgtagtggg

SEQ ID NO: 99941 - DNA, 21 bp, Artificial Sequence
  primer
gagtgtgtccctaaaccctcc

SEQ ID NO: 99942 - DNA, 20 bp, Artificial Sequence
  primer
cgctcccttggaagttacag

SEQ ID NO: 99943 - DNA, 38 bp, Artificial Sequence
  primer
gtaaaacgacggccagtatgggtagagctcctccttcc

SEQ ID NO: 99944 - DNA, 38 bp, Artificial Sequence
  primer
gtaaaacgacggccagtttaatcagggcaagcattcac

SEQ ID NO: 99945 - DNA, 39 bp, Artificial Sequence
  primer
gtaaaacgacggccagttggcaaagtgaattatggaagg

SEQ ID NO: 99946 - DNA, 41 bp, Artificial Sequence
  primer
gtaaaacgacggccagttccttgtctagagagatagctccg

SEQ ID NO: 99947 - DNA, 19 bp, Artificial Sequence
  primer
actgcgaattgagactgcg

SEQ ID NO: 99948 - DNA, 20 bp, Artificial Sequence
  primer
agaaggagagtgggtggcag

SEQ ID NO: 99949 - DNA, 38 bp, Artificial Sequence
  primer
gtaaaacgacggccagtacatttaggctggaatgggtg

SEQ ID NO: 99950 - DNA, 19 bp, Artificial Sequence
  primer
actgcgaattgagactgcg

SEQ ID NO: 99951 - DNA, 38 bp, Artificial Sequence
  primer
gtaaaacgacggccagtttccacggacagagatttgag

SEQ ID NO: 99952 - DNA, 38 bp, Artificial Sequence
  primer
gtaaaacgacggccagttcaccatctctctgaggaccc

SEQ ID NO: 99953 - DNA, 21 bp, Artificial Sequence
  primer
gcacagatatgggaggtgagg

SEQ ID NO: 99954 - DNA, 38 bp, Artificial Sequence
  primer
gtaaaacgacggccagtaacagaggacaacacccatcc

SEQ ID NO: 99955 - DNA, 38 bp, Artificial Sequence
  primer
gtaaaacgacggccagtttccaagcaaaggtggtaatg

SEQ ID NO: 99956 - DNA, 18 bp, Artificial Sequence
  primer
gggacctcgacccaactt

SEQ ID NO: 99957 - DNA, 38 bp, Artificial Sequence
  primer
gtaaaacgacggccagtgtgcacgactctggactcctc

SEQ ID NO: 99958 - DNA, 38 bp, Artificial Sequence
  primer
gtaaaacgacggccagtgactttggaatcatcatcggg

SEQ ID NO: 99959 - DNA, 21 bp, Artificial Sequence
  primer
agcctcaaactagctggcatc

SEQ ID NO: 99960 - DNA, 21 bp, Artificial Sequence
  primer
aggagtgggatacccaagatg

SEQ ID NO: 99961 - DNA, 21 bp, Artificial Sequence
  primer
ctgaagctgggtctctccatc

SEQ ID NO: 99962 - DNA, 20 bp, Artificial Sequence
  primer
agagaaggctgcagagtggt

SEQ ID NO: 99963 - DNA, 39 bp, Artificial Sequence
  primer
gtaaaacgacggccagtaaacatgacctggagagattcc

SEQ ID NO: 99964 - DNA, 38 bp, Artificial Sequence
  primer
gtaaaacgacggccagttgagaaccacagcactgaagg

SEQ ID NO: 99965 - DNA, 21 bp, Artificial Sequence
  primer
ggaaatctgacaggacaaggg

SEQ ID NO: 99966 - DNA, 39 bp, Artificial Sequence
  primer
gtaaaacgacggccagttccctggcctttgtgtattatg

SEQ ID NO: 99967 - DNA, 20 bp, Artificial Sequence
  primer
ctgctgtaaatgtctccggg

SEQ ID NO: 99968 - DNA, 21 bp, Artificial Sequence
  primer
gtggaaatggaaagaagctcg

SEQ ID NO: 99969 - DNA, 21 bp, Artificial Sequence
  primer
gtatagggtgaggtgcaagcc

SEQ ID NO: 99970 - DNA, 21 bp, Artificial Sequence
  primer
tgaggatagagccaggtaggg

SEQ ID NO: 99971 - DNA, 22 bp, Artificial Sequence
  primer
caccaggctccacagataagtc

SEQ ID NO: 99972 - DNA, 21 bp, Artificial Sequence
  primer
agtgcagttgcaggaagtctg

SEQ ID NO: 99973 - DNA, 21 bp, Artificial Sequence
  primer
aaccaagctgaaacgaaggag

SEQ ID NO: 99974 - DNA, 38 bp, Artificial Sequence
  primer
gtaaaacgacggccagtgcgagttggaacaagggatac

SEQ ID NO: 99975 - DNA, 23 bp, Artificial Sequence
  primer
cacacggtatgtggagtaagtgg

SEQ ID NO: 99976 - DNA, 38 bp, Artificial Sequence
  primer
gtaaaacgacggccagtaactgccttcttgaccttccc

SEQ ID NO: 99977 - DNA, 35 bp, Artificial Sequence
  primer
gtaaaacgacggccagtctgagcaggctccatccc

SEQ ID NO: 99978 - DNA, 20 bp, Artificial Sequence
  primer
agttctccatggtatggccc

SEQ ID NO: 99979 - DNA, 38 bp, Artificial Sequence
  primer
gtaaaacgacggccagttgcagatgactctgtcttccc

SEQ ID NO: 99980 - DNA, 25 bp, Artificial Sequence
  primer
tccagtttaattgtaacaaaccaca

SEQ ID NO: 99981 - DNA, 19 bp, Artificial Sequence
  primer
ttcaagggtggtgggattg

SEQ ID NO: 99982 - DNA, 21 bp, Artificial Sequence
  primer
gcttctccacacctctgtgtc

SEQ ID NO: 99983 - DNA, 21 bp, Artificial Sequence
  primer
ctgaatctccaacacagcagg

SEQ ID NO: 99984 - DNA, 21 bp, Artificial Sequence
  primer
actaccacttctccggtccag

SEQ ID NO: 99985 - DNA, 20 bp, Artificial Sequence
  primer
gggcagggcttagtataggg

SEQ ID NO: 99986 - DNA, 22 bp, Artificial Sequence
  primer
cacataggcatattgacaccca

SEQ ID NO: 99987 - DNA, 21 bp, Artificial Sequence
  primer
cattggttggaactctggttg

SEQ ID NO: 99988 - DNA, 39 bp, Artificial Sequence
  primer
gtaaaacgacggccagtcccagctggtttacacctttag

SEQ ID NO: 99989 - DNA, 38 bp, Artificial Sequence
  primer
gtaaaacgacggccagtacatgtttggctcctttccaa

SEQ ID NO: 99990 - DNA, 38 bp, Artificial Sequence
  primer
gtaaaacgacggccagtcagctccacctaagggacact

SEQ ID NO: 99991 - DNA, 38 bp, Artificial Sequence
  primer
gtaaaacgacggccagttttactaggatggaggcaggg

SEQ ID NO: 99992 - DNA, 38 bp, Artificial Sequence
  primer
gtaaaacgacggccagttccttctttgcattacctgcc

SEQ ID NO: 99993 - DNA, 38 bp, Artificial Sequence
  primer
gtaaaacgacggccagtatgtttggctcctctccaaag

SEQ ID NO: 99994 - DNA, 38 bp, Artificial Sequence
  primer
gtaaaacgacggccagtgctccacctgaaggacactaa

SEQ ID NO: 99995 - DNA, 21 bp, Artificial Sequence
  primer
agacagctgcagcatagcaag

SEQ ID NO: 99996 - DNA, 20 bp, Artificial Sequence
  primer
gacctcgtgatctggccttc

SEQ ID NO: 99997 - DNA, 38 bp, Artificial Sequence
  primer
gtaaaacgacggccagtgagctggcttccctttatgag

SEQ ID NO: 99998 - DNA, 21 bp, Artificial Sequence
  primer
gggtatctgacttacagcggg

SEQ ID NO: 99999 - DNA, 21 bp, Artificial Sequence
  primer
aagctcccagctagggtaagg

SEQ ID NO: 100000 - DNA, 38 bp, Artificial Sequence
  primer
gtaaaacgacggccagtgcagtacacagcaactccagg

SEQ ID NO: 100001 - DNA, 42 bp, Artificial Sequence
  primer
gtaaaacgacggccagtccatcttggaagttaccatagtgtc

SEQ ID NO: 100002 - DNA, 38 bp, Artificial Sequence
  primer
gtaaaacgacggccagttaagggttaaggaatgggcag

SEQ ID NO: 100003 - DNA, 36 bp, Artificial Sequence
  primer
gtaaaacgacggccagtaaacggctaggctgtttgc

SEQ ID NO: 100004 - DNA, 20 bp, Artificial Sequence
  primer
gtaatcggatgtgtttgccc

SEQ ID NO: 100005 - DNA, 21 bp, Artificial Sequence
  primer
cacaatatcacaccattgccc

SEQ ID NO: 100006 - DNA, 24 bp, Artificial Sequence
  primer
ccagtaaaccatttcctatctccc

SEQ ID NO: 100007 - DNA, 21 bp, Artificial Sequence
  primer
aagcaaagcagttaccagcac

SEQ ID NO: 100008 - DNA, 37 bp, Artificial Sequence
  primer
gtaaaacgacggccagtaccctactatgcctgggtcg

SEQ ID NO: 100009 - DNA, 27 bp, Artificial Sequence
  primer
actctctccagagtcaagaaattagtc

SEQ ID NO: 100010 - DNA, 38 bp, Artificial Sequence
  primer
gtaaaacgacggccagtacagctcatgcacaggtatgg

SEQ ID NO: 100011 - DNA, 21 bp, Artificial Sequence
  primer
aaggaagcatgctgactgctc

SEQ ID NO: 100012 - DNA, 18 bp, Artificial Sequence
  primer
gtttgggaggagcggaag

SEQ ID NO: 100013 - DNA, 20 bp, Artificial Sequence
  primer
tggagtcacaccatttgtgc

SEQ ID NO: 100014 - DNA, 20 bp, Artificial Sequence
  primer
tcaaggtgctaacactgggc

SEQ ID NO: 100015 - DNA, 20 bp, Artificial Sequence
  primer
agtcccacccactacggaac

SEQ ID NO: 100016 - DNA, 20 bp, Artificial Sequence
  primer
ttctgaggaactggaatggg

SEQ ID NO: 100017 - DNA, 38 bp, Artificial Sequence
  primer
gtaaaacgacggccagtattcactgcattgtttctggc

SEQ ID NO: 100018 - DNA, 38 bp, Artificial Sequence
  primer
gtaaaacgacggccagtgtatcacttctgagggccacc

SEQ ID NO: 100019 - DNA, 38 bp, Artificial Sequence
  primer
gtaaaacgacggccagtgtctgcacctcagatctcctg

SEQ ID NO: 100020 - DNA, 40 bp, Artificial Sequence
  primer
gtaaaacgacggccagtcattagagctgtcccaatttcac

SEQ ID NO: 100021 - DNA, 39 bp, Artificial Sequence
  primer
gtaaaacgacggccagtcagctcacatgttcaaggagac

SEQ ID NO: 100022 - DNA, 23 bp, Artificial Sequence
  primer
aaagctcacatgccacaattaag

SEQ ID NO: 100023 - DNA, 38 bp, Artificial Sequence
  primer
gtaaaacgacggccagttggaaggagatttggaatttg

SEQ ID NO: 100024 - DNA, 37 bp, Artificial Sequence
  primer
gtaaaacgacggccagtgaaagccagctggaccactc

SEQ ID NO: 100025 - DNA, 25 bp, Artificial Sequence
  primer
ccctcagtcctgtttatttacaagc

SEQ ID NO: 100026 - DNA, 38 bp, Artificial Sequence
  primer
gtaaaacgacggccagttgcaccaggatctacctcaag

SEQ ID NO: 100027 - DNA, 38 bp, Artificial Sequence
  primer
gtaaaacgacggccagttaagaaggaactgagggcagg

SEQ ID NO: 100028 - DNA, 38 bp, Artificial Sequence
  primer
gtaaaacgacggccagttgagacttgcctcaatcatgg

SEQ ID NO: 100029 - DNA, 23 bp, Artificial Sequence
  primer
cctggacaggagacaaatgtatg

SEQ ID NO: 100030 - DNA, 23 bp, Artificial Sequence
  primer
accaatgaagaatttgtctcagg

SEQ ID NO: 100031 - DNA, 38 bp, Artificial Sequence
  primer
gtaaaacgacggccagtcaggcaaagtgacatcctcag

SEQ ID NO: 100032 - DNA, 21 bp, Artificial Sequence
  primer
cattccgcctagcagtgtctc

SEQ ID NO: 100033 - DNA, 40 bp, Artificial Sequence
  primer
gtaaaacgacggccagtggcaatttcctgttaggacagag

SEQ ID NO: 100034 - DNA, 21 bp, Artificial Sequence
  primer
tgcaagcagacctcttggtat

SEQ ID NO: 100035 - DNA, 21 bp, Artificial Sequence
  primer
cggtgtgactctgtaaggtcg

SEQ ID NO: 100036 - DNA, 20 bp, Artificial Sequence
  primer
tgacaaaggccatgggtaac

SEQ ID NO: 100037 - DNA, 40 bp, Artificial Sequence
  primer
gtaaaacgacggccagtggaacatgtccacaaagaatcaa

SEQ ID NO: 100038 - DNA, 21 bp, Artificial Sequence
  primer
tataggtttgtgggtgggtgg

SEQ ID NO: 100039 - DNA, 37 bp, Artificial Sequence
  primer
gtaaaacgacggccagtaaagaggacaaggaaacggg

SEQ ID NO: 100040 - DNA, 39 bp, Artificial Sequence
  primer
gtaaaacgacggccagtgaacccacggttcttgatactc

SEQ ID NO: 100041 - DNA, 38 bp, Artificial Sequence
  primer
gtaaaacgacggccagttcctgctatgtgacaccaagg

SEQ ID NO: 100042 - DNA, 41 bp, Artificial Sequence
  primer
gtaaaacgacggccagttgaagctcagtaatcatgatggtc

SEQ ID NO: 100043 - DNA, 39 bp, Artificial Sequence
  primer
gtaaaacgacggccagtccatttacatctgaccagtggg

SEQ ID NO: 100044 - DNA, 40 bp, Artificial Sequence
  primer
gtaaaacgacggccagtaagctgaagctaagcccaataag

SEQ ID NO: 100045 - DNA, 37 bp, Artificial Sequence
  primer
gtaaaacgacggccagtgacatggctgagttccaagg

SEQ ID NO: 100046 - DNA, 19 bp, Artificial Sequence
  primer
gccagtgaaggaggagcac

SEQ ID NO: 100047 - DNA, 38 bp, Artificial Sequence
  primer
gtaaaacgacggccagtcctcttggagaaataaggccc

SEQ ID NO: 100048 - DNA, 20 bp, Artificial Sequence
  primer
ccttgtactgactgggcagc

SEQ ID NO: 100049 - DNA, 20 bp, Artificial Sequence
  primer
cttaagcagtggttcggacg

SEQ ID NO: 100050 - DNA, 20 bp, Artificial Sequence
  primer
gacctttggtgatctgcctg

SEQ ID NO: 100051 - DNA, 38 bp, Artificial Sequence
  primer
gtaaaacgacggccagttcagtgttcatgcttgctgtg

SEQ ID NO: 100052 - DNA, 27 bp, Artificial Sequence
  primer
tgtgttattaccatagctttccttgac

SEQ ID NO: 100053 - DNA, 21 bp, Artificial Sequence
  primer
actgtagcagggaatcgaagc

SEQ ID NO: 100054 - DNA, 21 bp, Artificial Sequence
  primer
acccaggagtcagaggttgtg

SEQ ID NO: 100055 - DNA, 27 bp, Artificial Sequence
  primer
actcactattaaatttccactcactcc

SEQ ID NO: 100056 - DNA, 40 bp, Artificial Sequence
  primer
gtaaaacgacggccagttctgaagttccaagtatgtgtgg

SEQ ID NO: 100057 - DNA, 23 bp, Artificial Sequence
  primer
ccaacaaataatggcttggtatt

SEQ ID NO: 100058 - DNA, 20 bp, Artificial Sequence
  primer
caccacctgatcagccaaac

SEQ ID NO: 100059 - DNA, 42 bp, Artificial Sequence
  primer
gtaaaacgacggccagtctactgcttgacttaatgagcaatg

SEQ ID NO: 100060 - DNA, 21 bp, Artificial Sequence
  primer
atgaccatctgtggctttcac

SEQ ID NO: 100061 - DNA, 21 bp, Artificial Sequence
  primer
tgaatgaccaattcttgcagc

SEQ ID NO: 100062 - DNA, 36 bp, Artificial Sequence
  primer
gtaaaacgacggccagtagcacaacaccaccacagc

SEQ ID NO: 100063 - DNA, 21 bp, Artificial Sequence
  primer
gtggcaacatgtaggaggctg

SEQ ID NO: 100064 - DNA, 39 bp, Artificial Sequence
  primer
gtaaaacgacggccagtggctttaggtgaaagcaaacag

SEQ ID NO: 100065 - DNA, 38 bp, Artificial Sequence
  primer
gtaaaacgacggccagtgtatggcttcctggaacttcg

SEQ ID NO: 100066 - DNA, 21 bp, Artificial Sequence
  primer
aaaggagaaacaaggcagctc

SEQ ID NO: 100067 - DNA, 21 bp, Artificial Sequence
  primer
gcagactgggatatggtatgc

SEQ ID NO: 100068 - DNA, 22 bp, Artificial Sequence
  primer
ccaaagtacaaagcaaaccagc

SEQ ID NO: 100069 - DNA, 41 bp, Artificial Sequence
  primer
gtaaaacgacggccagtccactggtcaatcgtctaatacag

SEQ ID NO: 100070 - DNA, 21 bp, Artificial Sequence
  primer
ttccaaagtcttcaatgctgc

SEQ ID NO: 100071 - DNA, 40 bp, Artificial Sequence
  primer
gtaaaacgacggccagtaaagctaaatcccaggtatgctg

SEQ ID NO: 100072 - DNA, 37 bp, Artificial Sequence
  primer
gtaaaacgacggccagttcccacatggatagactggc

SEQ ID NO: 100073 - DNA, 43 bp, Artificial Sequence
  primer
gtaaaacgacggccagttgaattcaggacaagtctgtttctac

SEQ ID NO: 100074 - DNA, 40 bp, Artificial Sequence
  primer
gtaaaacgacggccagtccatctatcattggagaagctca

SEQ ID NO: 100075 - DNA, 21 bp, Artificial Sequence
  primer
atcttcaaacggaatccatgc

SEQ ID NO: 100076 - DNA, 36 bp, Artificial Sequence
  primer
gtaaaacgacggccagtcgaagtgctggcttgactg

SEQ ID NO: 100077 - DNA, 39 bp, Artificial Sequence
  primer
gtaaaacgacggccagtttagcttccttcactggcaatc

SEQ ID NO: 100078 - DNA, 22 bp, Artificial Sequence
  primer
caggaaatgctgccaaataaag

SEQ ID NO: 100079 - DNA, 35 bp, Artificial Sequence
  primer
gtaaaacgacggccagtcaccaccacactccagcc

SEQ ID NO: 100080 - DNA, 38 bp, Artificial Sequence
  primer
gtaaaacgacggccagtcaaacagtgcctggtatgtgg

SEQ ID NO: 100081 - DNA, 40 bp, Artificial Sequence
  primer
gtaaaacgacggccagttgagttcctagaagatgggagaa

SEQ ID NO: 100082 - DNA, 21 bp, Artificial Sequence
  primer
ctcccaattgctaaatccgtg

SEQ ID NO: 100083 - DNA, 23 bp, Artificial Sequence
  primer
gaatgtcaaggcaaatgttcaag

SEQ ID NO: 100084 - DNA, 41 bp, Artificial Sequence
  primer
gtaaaacgacggccagtcagtaatgatgcctggaaagtacc

SEQ ID NO: 100085 - DNA, 38 bp, Artificial Sequence
  primer
gtaaaacgacggccagtgttggatgctcaaagcctgac

SEQ ID NO: 100086 - DNA, 41 bp, Artificial Sequence
  primer
gtaaaacgacggccagtggatgtgtttgagaacttcctttc

SEQ ID NO: 100087 - DNA, 21 bp, Artificial Sequence
  primer
cagagggtcacaatgttccag

SEQ ID NO: 100088 - DNA, 38 bp, Artificial Sequence
  primer
gtaaaacgacggccagtacattcatggcacttccatcc

SEQ ID NO: 100089 - DNA, 39 bp, Artificial Sequence
  primer
gtaaaacgacggccagtgggagttatctggagttagggc

SEQ ID NO: 100090 - DNA, 38 bp, Artificial Sequence
  primer
gtaaaacgacggccagttcatgctgttagctggctttg

SEQ ID NO: 100091 - DNA, 38 bp, Artificial Sequence
  primer
gtaaaacgacggccagtagtgtcgtgcagctggaatag

SEQ ID NO: 100092 - DNA, 22 bp, Artificial Sequence
  primer
ccatctgctcagtgtagggttc

SEQ ID NO: 100093 - DNA, 25 bp, Artificial Sequence
  primer
tgagaaatgctggaaattctaagtg

SEQ ID NO: 100094 - DNA, 22 bp, Artificial Sequence
  primer
gaggcaaatgacttctagctgc

SEQ ID NO: 100095 - DNA, 22 bp, Artificial Sequence
  primer
tgtcccagagataatccactgc

SEQ ID NO: 100096 - DNA, 21 bp, Artificial Sequence
  primer
gcaactagttccgagtcaggg

SEQ ID NO: 100097 - DNA, 22 bp, Artificial Sequence
  primer
tgtatggaaacactggaaatgg

SEQ ID NO: 100098 - DNA, 20 bp, Artificial Sequence
  primer
ctctccatcccatctttccc

SEQ ID NO: 100099 - DNA, 42 bp, Artificial Sequence
  primer
gtaaaacgacggccagtgccttgtttaaatgagtagtgttgc

SEQ ID NO: 100100 - DNA, 26 bp, Artificial Sequence
  primer
tctctttgattcaatactgactctcc

SEQ ID NO: 100101 - DNA, 19 bp, Artificial Sequence
  primer
accagaccatgccctcttg

SEQ ID NO: 100102 - DNA, 21 bp, Artificial Sequence
  primer
ttaatcatgcaccattctgcc

SEQ ID NO: 100103 - DNA, 39 bp, Artificial Sequence
  primer
gtaaaacgacggccagtctaagtatcagaacacggctgc

SEQ ID NO: 100104 - DNA, 39 bp, Artificial Sequence
  primer
gtaaaacgacggccagtcaggaatggtgctgttgatatg

SEQ ID NO: 100105 - DNA, 22 bp, Artificial Sequence
  primer
ttcagccctaggctattgacag

SEQ ID NO: 100106 - DNA, 21 bp, Artificial Sequence
  primer
tcaaatacaaaccaggcaggg

SEQ ID NO: 100107 - DNA, 24 bp, Artificial Sequence
  primer
tgcccattaatattatttgcattg

SEQ ID NO: 100108 - DNA, 38 bp, Artificial Sequence
  primer
gtaaaacgacggccagttgtgagtgagtccctttcagc

SEQ ID NO: 100109 - DNA, 21 bp, Artificial Sequence
  primer
gcaagcaagacaggtacaagc

SEQ ID NO: 100110 - DNA, 43 bp, Artificial Sequence
  primer
gtaaaacgacggccagtggtatcatttgggtaattatcttggg

SEQ ID NO: 100111 - DNA, 21 bp, Artificial Sequence
  primer
taaatagttaatgcaggcggg

SEQ ID NO: 100112 - DNA, 38 bp, Artificial Sequence
  primer
gtaaaacgacggccagtccatcatcagaggaaacctcg

SEQ ID NO: 100113 - DNA, 27 bp, Artificial Sequence
  primer
ataatgagtttcatagttgtgtcttgg

SEQ ID NO: 100114 - DNA, 38 bp, Artificial Sequence
  primer
gtaaaacgacggccagtagcacaattcgttgatttccc

SEQ ID NO: 100115 - DNA, 44 bp, Artificial Sequence
  primer
gtaaaacgacggccagtaaatggcctcataaatttaaagtaaac

SEQ ID NO: 100116 - DNA, 43 bp, Artificial Sequence
  primer
gtaaaacgacggccagtgcttaatattgatactaccgcatcat

SEQ ID NO: 100117 - DNA, 38 bp, Artificial Sequence
  primer
gtaaaacgacggccagtctttctctcactccctgccac

SEQ ID NO: 100118 - DNA, 36 bp, Artificial Sequence
  primer
gtaaaacgacggccagtgtccttctgggactccagg

SEQ ID NO: 100119 - DNA, 40 bp, Artificial Sequence
  primer
gtaaaacgacggccagttgtgtatacctaggcaccatgag

SEQ ID NO: 100120 - DNA, 23 bp, Artificial Sequence
  primer
gatcagcaactatgacatctgcc

SEQ ID NO: 100121 - DNA, 22 bp, Artificial Sequence
  primer
cctcctaagttgttgggatgac

SEQ ID NO: 100122 - DNA, 39 bp, Artificial Sequence
  primer
gtaaaacgacggccagtacctgagatagcctttgtttgc

SEQ ID NO: 100123 - DNA, 39 bp, Artificial Sequence
  primer
gtaaaacgacggccagtttggtacgcataatttcacagc

SEQ ID NO: 100124 - DNA, 40 bp, Artificial Sequence
  primer
gtaaaacgacggccagttctgtcatgggagataaatgctg

SEQ ID NO: 100125 - DNA, 36 bp, Artificial Sequence
  primer
gtaaaacgacggccagtttcccgacacaatgcaaag

SEQ ID NO: 100126 - DNA, 21 bp, Artificial Sequence
  primer
tacctgggagtgtaggtggtg

SEQ ID NO: 100127 - DNA, 37 bp, Artificial Sequence
  primer
gtaaaacgacggccagtcatggcctgcacacttaacc

SEQ ID NO: 100128 - DNA, 43 bp, Artificial Sequence
  primer
gtaaaacgacggccagtttgtgacatattgtctgcattaagaa

SEQ ID NO: 100129 - DNA, 25 bp, Artificial Sequence
  primer
tgtgttagccagtgttcaaagaact

SEQ ID NO: 100130 - DNA, 21 bp, Artificial Sequence
  primer
ctttatgccaccatgcaattt

SEQ ID NO: 100131 - DNA, 21 bp, Artificial Sequence
  primer
caagcaagcatgtgcagtacc

SEQ ID NO: 100132 - DNA, 39 bp, Artificial Sequence
  primer
gtaaaacgacggccagtggcagaaactcaagagacgttg

SEQ ID NO: 100133 - DNA, 24 bp, Artificial Sequence
  primer
tgtctgctgtttcaccatttattt

SEQ ID NO: 100134 - DNA, 24 bp, Artificial Sequence
  primer
gttgatacagcctttggtactgac

SEQ ID NO: 100135 - DNA, 37 bp, Artificial Sequence
  primer
gtaaaacgacggccagtacaatgccacagggactcac

SEQ ID NO: 100136 - DNA, 27 bp, Artificial Sequence
  primer
tcaacctgtttgaagcctaattatatc

SEQ ID NO: 100137 - DNA, 35 bp, Artificial Sequence
  primer
gtaaaacgacggccagtccacccacccttacaccc

SEQ ID NO: 100138 - DNA, 39 bp, Artificial Sequence
  primer
gtaaaacgacggccagtttcgttaaggttcaaatggtgg

SEQ ID NO: 100139 - DNA, 18 bp, Artificial Sequence
  primer
gtgcggactccaggaatg

SEQ ID NO: 100140 - DNA, 38 bp, Artificial Sequence
  primer
gtaaaacgacggccagtagaaccctccacggttaggac

SEQ ID NO: 100141 - DNA, 21 bp, Artificial Sequence
  primer
gagtccaagtgggttcagtcc

SEQ ID NO: 100142 - DNA, 38 bp, Artificial Sequence
  primer
gtaaaacgacggccagtgctcaacaggtgttggcatac

SEQ ID NO: 100143 - DNA, 25 bp, Artificial Sequence
  primer
catacttaagtgagcccagactttc

SEQ ID NO: 100144 - DNA, 38 bp, Artificial Sequence
  primer
gtaaaacgacggccagttgggatgcccaagttattctc

SEQ ID NO: 100145 - DNA, 38 bp, Artificial Sequence
  primer
gtaaaacgacggccagtaccctgcttaacattcgcttc

SEQ ID NO: 100146 - DNA, 38 bp, Artificial Sequence
  primer
gtaaaacgacggccagtgaatatgggaatgggaattgg

SEQ ID NO: 100147 - DNA, 21 bp, Artificial Sequence
  primer
gatccacttccactcccagag

SEQ ID NO: 100148 - DNA, 21 bp, Artificial Sequence
  primer
attagtgcgatgctgcttcag

SEQ ID NO: 100149 - DNA, 38 bp, Artificial Sequence
  primer
gtaaaacgacggccagttggcacatagcaaaggcttac

SEQ ID NO: 100150 - DNA, 21 bp, Artificial Sequence
  primer
ctttgtcatacacccttgggc

SEQ ID NO: 100151 - DNA, 21 bp, Artificial Sequence
  primer
tactctatctgtgccaaccgc

SEQ ID NO: 100152 - DNA, 22 bp, Artificial Sequence
  primer
aatgggagaccacacaattcac

SEQ ID NO: 100153 - DNA, 21 bp, Artificial Sequence
  primer
gaggaagaagcagaaagggtg

SEQ ID NO: 100154 - DNA, 38 bp, Artificial Sequence
  primer
gtaaaacgacggccagttcctaccctatgcaaaccctg

SEQ ID NO: 100155 - DNA, 38 bp, Artificial Sequence
  primer
gtaaaacgacggccagtcagaaccaatctctccttggg

SEQ ID NO: 100156 - DNA, 23 bp, Artificial Sequence
  primer
cagagccatgggtatgttatctg

SEQ ID NO: 100157 - DNA, 22 bp, Artificial Sequence
  primer
tccattcctcccataagatttg

SEQ ID NO: 100158 - DNA, 22 bp, Artificial Sequence
  primer
gggcctcctctacctctatgtg

SEQ ID NO: 100159 - DNA, 21 bp, Artificial Sequence
  primer
ttcagggaaactacgcctgtc

SEQ ID NO: 100160 - DNA, 20 bp, Artificial Sequence
  primer
attgcatgcaggtcaaggtc

SEQ ID NO: 100161 - DNA, 38 bp, Artificial Sequence
  primer
gtaaaacgacggccagtagaaccgtgggtttctcactc

SEQ ID NO: 100162 - DNA, 21 bp, Artificial Sequence
  primer
agaacacctccatgtcccatc

SEQ ID NO: 100163 - DNA, 21 bp, Artificial Sequence
  primer
caggtcagtgcatgttccttg

SEQ ID NO: 100164 - DNA, 24 bp, Artificial Sequence
  primer
gaaatagagaagggaatctgaggg

SEQ ID NO: 100165 - DNA, 19 bp, Artificial Sequence
  primer
acctcgccacattcaggac

SEQ ID NO: 100166 - DNA, 21 bp, Artificial Sequence
  primer
gacttccaagcctcagtttcc

SEQ ID NO: 100167 - DNA, 21 bp, Artificial Sequence
  primer
atcagcagctctaatggcctc

SEQ ID NO: 100168 - DNA, 21 bp, Artificial Sequence
  primer
ccatgtctagacgagtgtggc

SEQ ID NO: 100169 - DNA, 38 bp, Artificial Sequence
  primer
gtaaaacgacggccagttggagagggaacagtctcagg

SEQ ID NO: 100170 - DNA, 21 bp, Artificial Sequence
  primer
gagggagaggaacttgctgag

SEQ ID NO: 100171 - DNA, 38 bp, Artificial Sequence
  primer
gtaaaacgacggccagtcatctctgtgttccgggattc

SEQ ID NO: 100172 - DNA, 21 bp, Artificial Sequence
  primer
ggtgacctcgatgctgaagag

SEQ ID NO: 100173 - DNA, 21 bp, Artificial Sequence
  primer
agggaagaacagcagagggag

SEQ ID NO: 100174 - DNA, 20 bp, Artificial Sequence
  primer
aaagggaagaggcacctgag

SEQ ID NO: 100175 - DNA, 37 bp, Artificial Sequence
  primer
gtaaaacgacggccagttttgactgggccattctctc

SEQ ID NO: 100176 - DNA, 20 bp, Artificial Sequence
  primer
gagtgaacagggtgcctcag

SEQ ID NO: 100177 - DNA, 20 bp, Artificial Sequence
  primer
cactgtggagaggcttcgag

SEQ ID NO: 100178 - DNA, 21 bp, Artificial Sequence
  primer
aacgggtcattcagtgtaggg

SEQ ID NO: 100179 - DNA, 21 bp, Artificial Sequence
  primer
gattggacctgtgcatctgag

SEQ ID NO: 100180 - DNA, 38 bp, Artificial Sequence
  primer
gtaaaacgacggccagtttgctagaggtggctgtaggg

SEQ ID NO: 100181 - DNA, 38 bp, Artificial Sequence
  primer
gtaaaacgacggccagtgaaccaaggagactggtcctg

SEQ ID NO: 100182 - DNA, 22 bp, Artificial Sequence
  primer
tgagtcttctgtgttcacctgc

SEQ ID NO: 100183 - DNA, 21 bp, Artificial Sequence
  primer
ctcttccagctgggatgtacc

SEQ ID NO: 100184 - DNA, 21 bp, Artificial Sequence
  primer
aggcactgcagggttaatgac

SEQ ID NO: 100185 - DNA, 21 bp, Artificial Sequence
  primer
agtccagtggcaccttacctc

SEQ ID NO: 100186 - DNA, 38 bp, Artificial Sequence
  primer
gtaaaacgacggccagtaaggtgcctgtagctgacctc

SEQ ID NO: 100187 - DNA, 21 bp, Artificial Sequence
  primer
cactgagccaactcccttctc

SEQ ID NO: 100188 - DNA, 21 bp, Artificial Sequence
  primer
acccagatgtcagactcctcc

SEQ ID NO: 100189 - DNA, 21 bp, Artificial Sequence
  primer
ggcagaaggaatgaaagatgc

SEQ ID NO: 100190 - DNA, 38 bp, Artificial Sequence
  primer
gtaaaacgacggccagtgaacctgctaaatgccactca

SEQ ID NO: 100191 - DNA, 21 bp, Artificial Sequence
  primer
gtaaacatttggcagcctgag

SEQ ID NO: 100192 - DNA, 21 bp, Artificial Sequence
  primer
aaattgagggaaggagggaag

SEQ ID NO: 100193 - DNA, 38 bp, Artificial Sequence
  primer
gtaaaacgacggccagtagggtggatccatttgatgtg

SEQ ID NO: 100194 - DNA, 27 bp, Artificial Sequence
  primer
tcaatgatgtctaccatcagcttatac

SEQ ID NO: 100195 - DNA, 23 bp, Artificial Sequence
  primer
tgggaatggattctagaaagatg

SEQ ID NO: 100196 - DNA, 21 bp, Artificial Sequence
  primer
ctccaggtatggagcatgaat

SEQ ID NO: 100197 - DNA, 37 bp, Artificial Sequence
  primer
gtaaaacgacggccagttgagtgccaggcataactgc

SEQ ID NO: 100198 - DNA, 40 bp, Artificial Sequence
  primer
gtaaaacgacggccagttcccaagtcgttgactcaatatc

SEQ ID NO: 100199 - DNA, 21 bp, Artificial Sequence
  primer
cccaccaattaagcaagaatg

SEQ ID NO: 100200 - DNA, 21 bp, Artificial Sequence
  primer
tgtcaggacagctaagggagg

SEQ ID NO: 100201 - DNA, 22 bp, Artificial Sequence
  primer
catccactgaagcataccttcc

SEQ ID NO: 100202 - DNA, 37 bp, Artificial Sequence
  primer
gtaaaacgacggccagtgagctgactcacatgctccc

SEQ ID NO: 100203 - DNA, 21 bp, Artificial Sequence
  primer
acaactcctccattccaccag

SEQ ID NO: 100204 - DNA, 42 bp, Artificial Sequence
  primer
gtaaaacgacggccagtggaaagacagaactcaacagttcac

SEQ ID NO: 100205 - DNA, 21 bp, Artificial Sequence
  primer
acaactcctccattccaccag

SEQ ID NO: 100206 - DNA, 20 bp, Artificial Sequence
  primer
ctaacccagcacatgacacg

SEQ ID NO: 100207 - DNA, 38 bp, Artificial Sequence
  primer
gtaaaacgacggccagttaataaatccctcccacaggg

SEQ ID NO: 100208 - DNA, 21 bp, Artificial Sequence
  primer
cattcacaaatctcccagcag

SEQ ID NO: 100209 - DNA, 21 bp, Artificial Sequence
  primer
tgcttggcatgacagtgctac

SEQ ID NO: 100210 - DNA, 38 bp, Artificial Sequence
  primer
gtaaaacgacggccagtgcaaacctgcaagtcagacag

SEQ ID NO: 100211 - DNA, 21 bp, Artificial Sequence
  primer
aacagtggaaattgtggctcc

SEQ ID NO: 100212 - DNA, 38 bp, Artificial Sequence
  primer
gtaaaacgacggccagtgctccacagtcattgaacagc

SEQ ID NO: 100213 - DNA, 21 bp, Artificial Sequence
  primer
cattcaagaaaggccagttcc

SEQ ID NO: 100214 - DNA, 21 bp, Artificial Sequence
  primer
gtccatgtcttccttcttggc

SEQ ID NO: 100215 - DNA, 37 bp, Artificial Sequence
  primer
gtaaaacgacggccagtctctgggcaaatccaatgag

SEQ ID NO: 100216 - DNA, 38 bp, Artificial Sequence
  primer
gtaaaacgacggccagttggcttaatgcacatcacctc

SEQ ID NO: 100217 - DNA, 38 bp, Artificial Sequence
  primer
gtaaaacgacggccagtcaccacagcttactgccattc

SEQ ID NO: 100218 - DNA, 21 bp, Artificial Sequence
  primer
acagcttgaaactcatacggg

SEQ ID NO: 100219 - DNA, 21 bp, Artificial Sequence
  primer
agattcagtcacatccagggc

SEQ ID NO: 100220 - DNA, 38 bp, Artificial Sequence
  primer
gtaaaacgacggccagtactcagctcaggacttacggg

SEQ ID NO: 100221 - DNA, 21 bp, Artificial Sequence
  primer
gagaaaggcagctggtactgg

SEQ ID NO: 100222 - DNA, 38 bp, Artificial Sequence
  primer
gtaaaacgacggccagttcaaattgtggtatgtgctgg

SEQ ID NO: 100223 - DNA, 21 bp, Artificial Sequence
  primer
gggtgtttgcattaacattgg

SEQ ID NO: 100224 - DNA, 19 bp, Artificial Sequence
  primer
agagcactcagggactggg

SEQ ID NO: 100225 - DNA, 21 bp, Artificial Sequence
  primer
acagagcttggaggagtccag

SEQ ID NO: 100226 - DNA, 38 bp, Artificial Sequence
  primer
gtaaaacgacggccagtgtatgatacctgggctctgcc

SEQ ID NO: 100227 - DNA, 21 bp, Artificial Sequence
  primer
tggcaaacctaactggaaagg

SEQ ID NO: 100228 - DNA, 21 bp, Artificial Sequence
  primer
ccactgggaagccactgtaag

SEQ ID NO: 100229 - DNA, 38 bp, Artificial Sequence
  primer
gtaaaacgacggccagtcttctggctcctaaccagtcc

SEQ ID NO: 100230 - DNA, 27 bp, Artificial Sequence
  primer
tcatttaaactgggttctacttctttc

SEQ ID NO: 100231 - DNA, 43 bp, Artificial Sequence
  primer
gtaaaacgacggccagttggttaacttgtaggaaagagacaac

SEQ ID NO: 100232 - DNA, 20 bp, Artificial Sequence
  primer
gcacgtgaagcagggtagac

SEQ ID NO: 100233 - DNA, 37 bp, Artificial Sequence
  primer
gtaaaacgacggccagtactccctgggacagaaggtc

SEQ ID NO: 100234 - DNA, 21 bp, Artificial Sequence
  primer
agtgaggtctgcctgtatcgc

SEQ ID NO: 100235 - DNA, 21 bp, Artificial Sequence
  primer
ctcgctttcatttcacaaagc

SEQ ID NO: 100236 - DNA, 39 bp, Artificial Sequence
  primer
gtaaaacgacggccagtcatctttgcggcatctgtaatc

SEQ ID NO: 100237 - DNA, 37 bp, Artificial Sequence
  primer
gtaaaacgacggccagtacattctggaaggaggtggg

SEQ ID NO: 100238 - DNA, 21 bp, Artificial Sequence
  primer
gcagacatcagctgtttgagg

SEQ ID NO: 100239 - DNA, 21 bp, Artificial Sequence
  primer
aggttccaatgtgatgtcagg

SEQ ID NO: 100240 - DNA, 38 bp, Artificial Sequence
  primer
gtaaaacgacggccagtgagcaagtgtcgagtctgacc

SEQ ID NO: 100241 - DNA, 38 bp, Artificial Sequence
  primer
gtaaaacgacggccagtgtccagtgtggaggttatggg

SEQ ID NO: 100242 - DNA, 39 bp, Artificial Sequence
  primer
gtaaaacgacggccagttctgctcatttctctctggtcc

SEQ ID NO: 100243 - DNA, 21 bp, Artificial Sequence
  primer
tggccgtgtttagattctcag

SEQ ID NO: 100244 - DNA, 38 bp, Artificial Sequence
  primer
gtaaaacgacggccagtggtaatgggtgtggaaggatg

SEQ ID NO: 100245 - DNA, 38 bp, Artificial Sequence
  primer
gtaaaacgacggccagtagaagtcctggtcttgcttgg

SEQ ID NO: 100246 - DNA, 21 bp, Artificial Sequence
  primer
acatggctttgaaccacactg

SEQ ID NO: 100247 - DNA, 22 bp, Artificial Sequence
  primer
ccacgtggatatcataaatgcc

SEQ ID NO: 100248 - DNA, 21 bp, Artificial Sequence
  primer
tgggtgtgttgcttctttcag

SEQ ID NO: 100249 - DNA, 38 bp, Artificial Sequence
  primer
gtaaaacgacggccagtcaaagcactaagccgtgtgag

SEQ ID NO: 100250 - DNA, 20 bp, Artificial Sequence
  primer
ttctgatccatgttcccagc

SEQ ID NO: 100251 - DNA, 20 bp, Artificial Sequence
  primer
actctgcacttctcgccttg

SEQ ID NO: 100252 - DNA, 21 bp, Artificial Sequence
  primer
aggttgaagacttgggagacg

SEQ ID NO: 100253 - DNA, 21 bp, Artificial Sequence
  primer
gggttcaaagctagtgttggg

SEQ ID NO: 100254 - DNA, 21 bp, Artificial Sequence
  primer
gtgagtgggtgactgggaatc

SEQ ID NO: 100255 - DNA, 18 bp, Artificial Sequence
  primer
ctccaggaccgagacacg

SEQ ID NO: 100256 - DNA, 21 bp, Artificial Sequence
  primer
ccaaggaaatcttccctgaac

SEQ ID NO: 100257 - DNA, 38 bp, Artificial Sequence
  primer
gtaaaacgacggccagtaggaacagctggttctcactg

SEQ ID NO: 100258 - DNA, 21 bp, Artificial Sequence
  primer
agaaaccagacgaaccacagg

SEQ ID NO: 100259 - DNA, 20 bp, Artificial Sequence
  primer
ctccacctgcactggaacac

SEQ ID NO: 100260 - DNA, 20 bp, Artificial Sequence
  primer
tgtcagccaatgtgatggtg

SEQ ID NO: 100261 - DNA, 21 bp, Artificial Sequence
  primer
ccacgcaagcatttctgtatg

SEQ ID NO: 100262 - DNA, 37 bp, Artificial Sequence
  primer
gtaaaacgacggccagtcggtgctcagagacacacat

SEQ ID NO: 100263 - DNA, 20 bp, Artificial Sequence
  primer
agggctggacccaagtacac

SEQ ID NO: 100264 - DNA, 20 bp, Artificial Sequence
  primer
acttgccagtggagagcaag

SEQ ID NO: 100265 - DNA, 20 bp, Artificial Sequence
  primer
aacctgggccttaagcaaac

SEQ ID NO: 100266 - DNA, 38 bp, Artificial Sequence
  primer
gtaaaacgacggccagtataaacaacgggaagccacag

SEQ ID NO: 100267 - DNA, 21 bp, Artificial Sequence
  primer
atacacagcctttctttcggc

SEQ ID NO: 100268 - DNA, 21 bp, Artificial Sequence
  primer
tctgggtggacaggactaacc

SEQ ID NO: 100269 - DNA, 37 bp, Artificial Sequence
  primer
gtaaaacgacggccagtatccatgctagggatgaccc

SEQ ID NO: 100270 - DNA, 35 bp, Artificial Sequence
  primer
gtaaaacgacggccagtgccctgggacttctgctc

SEQ ID NO: 100271 - DNA, 20 bp, Artificial Sequence
  primer
atgatgacggtcaggctcag

SEQ ID NO: 100272 - DNA, 21 bp, Artificial Sequence
  primer
gaacacagggcttgaggagtc

SEQ ID NO: 100273 - DNA, 21 bp, Artificial Sequence
  primer
gccaccaactcccacagttac

SEQ ID NO: 100274 - DNA, 36 bp, Artificial Sequence
  primer
gtaaaacgacggccagtaaaccttgccgtgtgcttc

SEQ ID NO: 100275 - DNA, 20 bp, Artificial Sequence
  primer
gtctcggaagtccttcagcc

SEQ ID NO: 100276 - DNA, 21 bp, Artificial Sequence
  primer
ggagacagagtcaccgagtcc

SEQ ID NO: 100277 - DNA, 37 bp, Artificial Sequence
  primer
gtaaaacgacggccagtctgagagtaagcacgggcag

SEQ ID NO: 100278 - DNA, 37 bp, Artificial Sequence
  primer
gtaaaacgacggccagtagtgactccgggaggaaatg

SEQ ID NO: 100279 - DNA, 20 bp, Artificial Sequence
  primer
aatgacaggagggtggttcc

SEQ ID NO: 100280 - DNA, 20 bp, Artificial Sequence
  primer
gagtagagccagagccctcc

SEQ ID NO: 100281 - DNA, 21 bp, Artificial Sequence
  primer
ttcaggcaagccacataactc

SEQ ID NO: 100282 - DNA, 38 bp, Artificial Sequence
  primer
gtaaaacgacggccagtagtctgctctgacccagcttt

SEQ ID NO: 100283 - DNA, 20 bp, Artificial Sequence
  primer
agtccagggctcagagtcag

SEQ ID NO: 100284 - DNA, 22 bp, Artificial Sequence
  primer
ggatttcaaacccaagtctgtg

SEQ ID NO: 100285 - DNA, 21 bp, Artificial Sequence
  primer
acacagaggagaagggaggtc

SEQ ID NO: 100286 - DNA, 21 bp, Artificial Sequence
  primer
aaggttcgctgacagaagagg

SEQ ID NO: 100287 - DNA, 37 bp, Artificial Sequence
  primer
gtaaaacgacggccagtggctagggagggatttaggg

SEQ ID NO: 100288 - DNA, 38 bp, Artificial Sequence
  primer
gtaaaacgacggccagtgggtgctgagggtattacgtg

SEQ ID NO: 100289 - DNA, 38 bp, Artificial Sequence
  primer
gtaaaacgacggccagttgaagccacttatccaggacc

SEQ ID NO: 100290 - DNA, 21 bp, Artificial Sequence
  primer
cttagtaccacccgggaagag

SEQ ID NO: 100291 - DNA, 20 bp, Artificial Sequence
  primer
actcagtgactgctccgtgc

SEQ ID NO: 100292 - DNA, 35 bp, Artificial Sequence
  primer
gtaaaacgacggccagtcagctgcggtggtgtttc

SEQ ID NO: 100293 - DNA, 21 bp, Artificial Sequence
  primer
tgtctgcctgacaggttcaag

SEQ ID NO: 100294 - DNA, 38 bp, Artificial Sequence
  primer
gtaaaacgacggccagtctcagaccacctctccctcag

SEQ ID NO: 100295 - DNA, 21 bp, Artificial Sequence
  primer
cccaattccctcatctctctg

SEQ ID NO: 100296 - DNA, 21 bp, Artificial Sequence
  primer
attgcacagatgggatcactg

SEQ ID NO: 100297 - DNA, 38 bp, Artificial Sequence
  primer
gtaaaacgacggccagtctgggctaggttagagttgcc

SEQ ID NO: 100298 - DNA, 21 bp, Artificial Sequence
  primer
tgtatctcccgaaaggcagag

SEQ ID NO: 100299 - DNA, 21 bp, Artificial Sequence
  primer
caggagtaaagccaggaccag

SEQ ID NO: 100300 - DNA, 21 bp, Artificial Sequence
  primer
ttgtctgtgaaatgaggctgc

SEQ ID NO: 100301 - DNA, 36 bp, Artificial Sequence
  primer
gtaaaacgacggccagtctctgacgcagctttcgtg

SEQ ID NO: 100302 - DNA, 37 bp, Artificial Sequence
  primer
gtaaaacgacggccagtttgcttgctcttgttctggg

SEQ ID NO: 100303 - DNA, 21 bp, Artificial Sequence
  primer
cttagcaccgccaatcaagtc

SEQ ID NO: 100304 - DNA, 21 bp, Artificial Sequence
  primer
aaggaggtgggaacaaggaag

SEQ ID NO: 100305 - DNA, 22 bp, Artificial Sequence
  primer
ttcgctgacagaagaggtaagc

SEQ ID NO: 100306 - DNA, 38 bp, Artificial Sequence
  primer
gtaaaacgacggccagtatgggctaggatgggctttag

SEQ ID NO: 100307 - DNA, 23 bp, Artificial Sequence
  primer
cctcccgaagctgtagtatcatc

SEQ ID NO: 100308 - DNA, 21 bp, Artificial Sequence
  primer
atcaggaaatgtgggtggaag

SEQ ID NO: 100309 - DNA, 21 bp, Artificial Sequence
  primer
agctcctggccacagacttag

SEQ ID NO: 100310 - DNA, 37 bp, Artificial Sequence
  primer
gtaaaacgacggccagtgaaccaccagccaattctcc

SEQ ID NO: 100311 - DNA, 18 bp, Artificial Sequence
  primer
ttcgaggtgcccttcacc

SEQ ID NO: 100312 - DNA, 21 bp, Artificial Sequence
  primer
tgtctgcctgacaggttcaag

SEQ ID NO: 100313 - DNA, 38 bp, Artificial Sequence
  primer
gtaaaacgacggccagtctctccctcaggatatcagcg

SEQ ID NO: 100314 - DNA, 38 bp, Artificial Sequence
  primer
gtaaaacgacggccagtaggagcaggaagcagcataag

SEQ ID NO: 100315 - DNA, 21 bp, Artificial Sequence
  primer
attgcacagatgggatcactg

SEQ ID NO: 100316 - DNA, 38 bp, Artificial Sequence
  primer
gtaaaacgacggccagtttatgccaaagaatggagctg

SEQ ID NO: 100317 - DNA, 23 bp, Artificial Sequence
  primer
tgataaccatggaatcacacaac

SEQ ID NO: 100318 - DNA, 39 bp, Artificial Sequence
  primer
gtaaaacgacggccagtaggtctatgtttgcagtttgcc

SEQ ID NO: 100319 - DNA, 38 bp, Artificial Sequence
  primer
gtaaaacgacggccagtggaaatgatggcactagcagg

SEQ ID NO: 100320 - DNA, 41 bp, Artificial Sequence
  primer
gtaaaacgacggccagttccctcctatattgaggaaagaag

SEQ ID NO: 100321 - DNA, 22 bp, Artificial Sequence
  primer
ctcagaggagtccagtctaggg

SEQ ID NO: 100322 - DNA, 21 bp, Artificial Sequence
  primer
cagccagccatagacagctac

SEQ ID NO: 100323 - DNA, 39 bp, Artificial Sequence
  primer
gtaaaacgacggccagtagtcattgagcacagccctaac

SEQ ID NO: 100324 - DNA, 21 bp, Artificial Sequence
  primer
cgagacaagacactgcaacac

SEQ ID NO: 100325 - DNA, 41 bp, Artificial Sequence
  primer
gtaaaacgacggccagtaacatgtcctcatattcagaccct

SEQ ID NO: 100326 - DNA, 38 bp, Artificial Sequence
  primer
gtaaaacgacggccagtgttaattatgggagggccttg

SEQ ID NO: 100327 - DNA, 21 bp, Artificial Sequence
  primer
tgtgacgccgtctaatatccc

SEQ ID NO: 100328 - DNA, 38 bp, Artificial Sequence
  primer
gtaaaacgacggccagtacagattgtgggagtccatcc

SEQ ID NO: 100329 - DNA, 37 bp, Artificial Sequence
  primer
gtaaaacgacggccagtcacactgtgacgagcaaacc

SEQ ID NO: 100330 - DNA, 38 bp, Artificial Sequence
  primer
gtaaaacgacggccagtcacttggccagtttgatgttg

SEQ ID NO: 100331 - DNA, 38 bp, Artificial Sequence
  primer
gtaaaacgacggccagttggaatgtcaatttcaatggc

SEQ ID NO: 100332 - DNA, 21 bp, Artificial Sequence
  primer
tacctcaattgtgatgcaggc

SEQ ID NO: 100333 - DNA, 18 bp, Artificial Sequence
  primer
cttcatcccgatgacggc

SEQ ID NO: 100334 - DNA, 21 bp, Artificial Sequence
  primer
ctcacacgtagtcgttcagcc

SEQ ID NO: 100335 - DNA, 39 bp, Artificial Sequence
  primer
gtaaaacgacggccagttgctctaaagacatttcctcgc

SEQ ID NO: 100336 - DNA, 21 bp, Artificial Sequence
  primer
cagacccgcagagcttaattc

SEQ ID NO: 100337 - DNA, 21 bp, Artificial Sequence
  primer
ttagatgaggacaaagcagcc

SEQ ID NO: 100338 - DNA, 21 bp, Artificial Sequence
  primer
cccaggatggagatcagtgag

SEQ ID NO: 100339 - DNA, 38 bp, Artificial Sequence
  primer
gtaaaacgacggccagttgctacacgtaggcgtttctg

SEQ ID NO: 100340 - DNA, 36 bp, Artificial Sequence
  primer
gtaaaacgacggccagttgagagtgcaagacacggg

SEQ ID NO: 100341 - DNA, 20 bp, Artificial Sequence
  primer
ccacagaaagaactgccctg

SEQ ID NO: 100342 - DNA, 19 bp, Artificial Sequence
  primer
agcctgaagtctgcggttg

SEQ ID NO: 100343 - DNA, 38 bp, Artificial Sequence
  primer
gtaaaacgacggccagtatgttgtacatggcagttggg

SEQ ID NO: 100344 - DNA, 21 bp, Artificial Sequence
  primer
ccattacaaactggaccgaac

SEQ ID NO: 100345 - DNA, 39 bp, Artificial Sequence
  primer
gtaaaacgacggccagttcagcacaactctctccttcac

SEQ ID NO: 100346 - DNA, 21 bp, Artificial Sequence
  primer
aattgcccttgaacaattgga

SEQ ID NO: 100347 - DNA, 43 bp, Artificial Sequence
  primer
gtaaaacgacggccagtttctaaataactgttcctggattgac

SEQ ID NO: 100348 - DNA, 21 bp, Artificial Sequence
  primer
atcaaggagagagcaacagcc

SEQ ID NO: 100349 - DNA, 38 bp, Artificial Sequence
  primer
gtaaaacgacggccagtctccaatgaagaggacagcag

SEQ ID NO: 100350 - DNA, 21 bp, Artificial Sequence
  primer
agcgattgggtccaacaatag

SEQ ID NO: 100351 - DNA, 21 bp, Artificial Sequence
  primer
tcacacctttcattctgagcc

SEQ ID NO: 100352 - DNA, 21 bp, Artificial Sequence
  primer
ccacattcagcagtagggagg

SEQ ID NO: 100353 - DNA, 23 bp, Artificial Sequence
  primer
cagcctcaagtcatatcaccaag

SEQ ID NO: 100354 - DNA, 22 bp, Artificial Sequence
  primer
aggctgaaatattcccattctg

SEQ ID NO: 100355 - DNA, 20 bp, Artificial Sequence
  primer
tccaaagatgaaatcgaggc

SEQ ID NO: 100356 - DNA, 38 bp, Artificial Sequence
  primer
gtaaaacgacggccagtcgcagatagcagactgtgagg

SEQ ID NO: 100357 - DNA, 21 bp, Artificial Sequence
  primer
cttgggttgaagaactcctgg

SEQ ID NO: 100358 - DNA, 21 bp, Artificial Sequence
  primer
agagagtccttgctgcacctg

SEQ ID NO: 100359 - DNA, 21 bp, Artificial Sequence
  primer
agcacctatgcccatcctatg

SEQ ID NO: 100360 - DNA, 38 bp, Artificial Sequence
  primer
gtaaaacgacggccagtctcctcatctttctgcccaag

SEQ ID NO: 100361 - DNA, 38 bp, Artificial Sequence
  primer
gtaaaacgacggccagtgcccaagtaaagagcctctcc

SEQ ID NO: 100362 - DNA, 38 bp, Artificial Sequence
  primer
gtaaaacgacggccagtgtagtgtccctcacctgtggc

SEQ ID NO: 100363 - DNA, 38 bp, Artificial Sequence
  primer
gtaaaacgacggccagtaagcatggctcttggtttctc

SEQ ID NO: 100364 - DNA, 21 bp, Artificial Sequence
  primer
ttgtgtgtggaattgttctcg

SEQ ID NO: 100365 - DNA, 20 bp, Artificial Sequence
  primer
aggccctggtacaactccac

SEQ ID NO: 100366 - DNA, 21 bp, Artificial Sequence
  primer
aaggcagatttccatccacac

SEQ ID NO: 100367 - DNA, 20 bp, Artificial Sequence
  primer
ctgaaggtcctgtggcagtg

SEQ ID NO: 100368 - DNA, 35 bp, Artificial Sequence
  primer
gtaaaacgacggccagtgcgagaaggaacagcacg

SEQ ID NO: 100369 - DNA, 20 bp, Artificial Sequence
  primer
ctgcgtctgtcccttagacg

SEQ ID NO: 100370 - DNA, 37 bp, Artificial Sequence
  primer
gtaaaacgacggccagtacagtccatgcaggttggtc

SEQ ID NO: 100371 - DNA, 22 bp, Artificial Sequence
  primer
cagcggattgtagaagtcttgg

SEQ ID NO: 100372 - DNA, 38 bp, Artificial Sequence
  primer
gtaaaacgacggccagtcagtccagggaagaacaaagc

SEQ ID NO: 100373 - DNA, 38 bp, Artificial Sequence
  primer
gtaaaacgacggccagtggagggtggactctgttcttg

SEQ ID NO: 100374 - DNA, 21 bp, Artificial Sequence
  primer
accgagtcgtacactttgcac

SEQ ID NO: 100375 - DNA, 37 bp, Artificial Sequence
  primer
gtaaaacgacggccagtaacaggtagagcacgcctcc

SEQ ID NO: 100376 - DNA, 21 bp, Artificial Sequence
  primer
cgccctcagacgtagttcttc

SEQ ID NO: 100377 - DNA, 36 bp, Artificial Sequence
  primer
gtaaaacgacggccagtggctagtggcaggagaagg

SEQ ID NO: 100378 - DNA, 38 bp, Artificial Sequence
  primer
gtaaaacgacggccagtgggttatagaagtcccggatg

SEQ ID NO: 100379 - DNA, 39 bp, Artificial Sequence
  primer
gtaaaacgacggccagtgagtctgagtcaacaccttggc

SEQ ID NO: 100380 - DNA, 18 bp, Artificial Sequence
  primer
ccagccgaccacttcctc

SEQ ID NO: 100381 - DNA, 21 bp, Artificial Sequence
  primer
gacctggagacagaatgaggg

SEQ ID NO: 100382 - DNA, 21 bp, Artificial Sequence
  primer
agggccaaactcatacctgtg

SEQ ID NO: 100383 - DNA, 21 bp, Artificial Sequence
  primer
atacatggagtgcagggacag

SEQ ID NO: 100384 - DNA, 21 bp, Artificial Sequence
  primer
aaagccaagaaggacatcacg

SEQ ID NO: 100385 - DNA, 38 bp, Artificial Sequence
  primer
gtaaaacgacggccagtacttctggagtagacgctcgg

SEQ ID NO: 100386 - DNA, 44 bp, Artificial Sequence
  primer
gtaaaacgacggccagtacagttcctgtaattaagattaggcag

SEQ ID NO: 100387 - DNA, 39 bp, Artificial Sequence
  primer
gtaaaacgacggccagttgtagaagtcctggatgatggc

SEQ ID NO: 100388 - DNA, 21 bp, Artificial Sequence
  primer
aaggaggttgtgatggagcag

SEQ ID NO: 100389 - DNA, 38 bp, Artificial Sequence
  primer
gtaaaacgacggccagttatctttccctccaccaatgc

SEQ ID NO: 100390 - DNA, 21 bp, Artificial Sequence
  primer
gctcctactgtggacctcacc

SEQ ID NO: 100391 - DNA, 21 bp, Artificial Sequence
  primer
gacacggagacttggcttagg

SEQ ID NO: 100392 - DNA, 20 bp, Artificial Sequence
  primer
gcagttcagcaccaggagtc

SEQ ID NO: 100393 - DNA, 37 bp, Artificial Sequence
  primer
gtaaaacgacggccagtatagggtggagaggctgagg

SEQ ID NO: 100394 - DNA, 21 bp, Artificial Sequence
  primer
tcccagccaactccttaaact

SEQ ID NO: 100395 - DNA, 21 bp, Artificial Sequence
  primer
ctggcttccagttcctgagag

SEQ ID NO: 100396 - DNA, 21 bp, Artificial Sequence
  primer
cttatttctctcccagagcgg

SEQ ID NO: 100397 - DNA, 38 bp, Artificial Sequence
  primer
gtaaaacgacggccagttgtccatttccctaaccttgc

SEQ ID NO: 100398 - DNA, 36 bp, Artificial Sequence
  primer
gtaaaacgacggccagtacttggcagtgaaccgacc

SEQ ID NO: 100399 - DNA, 21 bp, Artificial Sequence
  primer
gggtcaccttctcaaccagtc

SEQ ID NO: 100400 - DNA, 19 bp, Artificial Sequence
  primer
gaagggaagggagattccg

SEQ ID NO: 100401 - DNA, 27 bp, Artificial Sequence
  primer
aaattctgtcccaattatattgagtgt

SEQ ID NO: 100402 - DNA, 36 bp, Artificial Sequence
  primer
gtaaaacgacggccagttccttgtgggcctatcacc

SEQ ID NO: 100403 - DNA, 39 bp, Artificial Sequence
  primer
gtaaaacgacggccagtatgactccctagagaaaggctg

SEQ ID NO: 100404 - DNA, 21 bp, Artificial Sequence
  primer
accagaatcatgagtgggttg

SEQ ID NO: 100405 - DNA, 21 bp, Artificial Sequence
  primer
ttctccataatttggctgctg

SEQ ID NO: 100406 - DNA, 36 bp, Artificial Sequence
  primer
gtaaaacgacggccagtgatggaaagtgggaggtgg

SEQ ID NO: 100407 - DNA, 20 bp, Artificial Sequence
  primer
aacagcaggtctttggagcc

SEQ ID NO: 100408 - DNA, 19 bp, Artificial Sequence
  primer
gcaaaggctcgttctccag

SEQ ID NO: 100409 - DNA, 21 bp, Artificial Sequence
  primer
tacttgcacaggtagccgttg

SEQ ID NO: 100410 - DNA, 21 bp, Artificial Sequence
  primer
taggcagttagggagctctgc

SEQ ID NO: 100411 - DNA, 38 bp, Artificial Sequence
  primer
gtaaaacgacggccagtgggtagacatcgtgctctgtg

SEQ ID NO: 100412 - DNA, 38 bp, Artificial Sequence
  primer
gtaaaacgacggccagtttcgtgaaagcagagcttgac

SEQ ID NO: 100413 - DNA, 38 bp, Artificial Sequence
  primer
gtaaaacgacggccagtgctcctcagtggagtaaaggg

SEQ ID NO: 100414 - DNA, 21 bp, Artificial Sequence
  primer
atgtcacagggcgagtaattg

SEQ ID NO: 100415 - DNA, 21 bp, Artificial Sequence
  primer
gggctgaagcatgcatttatt

SEQ ID NO: 100416 - DNA, 20 bp, Artificial Sequence
  primer
tgactctcactttcaccggc

SEQ ID NO: 100417 - DNA, 39 bp, Artificial Sequence
  primer
gtaaaacgacggccagtaacctgtggaccgatattcttg

SEQ ID NO: 100418 - DNA, 38 bp, Artificial Sequence
  primer
gtaaaacgacggccagttgatggaccaaattcttgagc

SEQ ID NO: 100419 - DNA, 21 bp, Artificial Sequence
  primer
tcccaatgtctcaactagccc

SEQ ID NO: 100420 - DNA, 23 bp, Artificial Sequence
  primer
cctgcacatatattggatgtttg

SEQ ID NO: 100421 - DNA, 22 bp, Artificial Sequence
  primer
cagacaaatagcgaccattgag

SEQ ID NO: 100422 - DNA, 21 bp, Artificial Sequence
  primer
ttctggagaaaccaagcacag

SEQ ID NO: 100423 - DNA, 23 bp, Artificial Sequence
  primer
gtggattgaatatctgggttctg

SEQ ID NO: 100424 - DNA, 22 bp, Artificial Sequence
  primer
ccagctgctgcttctataaccc

SEQ ID NO: 100425 - DNA, 38 bp, Artificial Sequence
  primer
gtaaaacgacggccagtaaactcacgtgatggcttctg

SEQ ID NO: 100426 - DNA, 21 bp, Artificial Sequence
  primer
aacaggcttccacaattctcc

SEQ ID NO: 100427 - DNA, 20 bp, Artificial Sequence
  primer
gggagaggcaaggattatgg

SEQ ID NO: 100428 - DNA, 37 bp, Artificial Sequence
  primer
gtaaaacgacggccagtggaagaagaggagggtttgc

SEQ ID NO: 100429 - DNA, 21 bp, Artificial Sequence
  primer
ggcatatgtcatcgattggag

SEQ ID NO: 100430 - DNA, 40 bp, Artificial Sequence
  primer
gtaaaacgacggccagttgtgaatcaaagatggaaagagg

SEQ ID NO: 100431 - DNA, 26 bp, Artificial Sequence
  primer
tttggtatctctgatgccttacatag

SEQ ID NO: 100432 - DNA, 41 bp, Artificial Sequence
  primer
gtaaaacgacggccagtacctttatgtcacatggcatactc

SEQ ID NO: 100433 - DNA, 19 bp, Artificial Sequence
  primer
aaccttcatggttgcctcc

SEQ ID NO: 100434 - DNA, 22 bp, Artificial Sequence
  primer
gtgtagcctgacacgtaagcag

SEQ ID NO: 100435 - DNA, 39 bp, Artificial Sequence
  primer
gtaaaacgacggccagtttatggactcccacattccatc

SEQ ID NO: 100436 - DNA, 26 bp, Artificial Sequence
  primer
cactaaacttggaataatgtgaaccc

SEQ ID NO: 100437 - DNA, 24 bp, Artificial Sequence
  primer
tgctaggttactctttcgttatgc

SEQ ID NO: 100438 - DNA, 22 bp, Artificial Sequence
  primer
caagttggcaccatcttctttc

SEQ ID NO: 100439 - DNA, 42 bp, Artificial Sequence
  primer
gtaaaacgacggccagtgggagaacaggtaatattagcacca

SEQ ID NO: 100440 - DNA, 21 bp, Artificial Sequence
  primer
tatagggatgatggcatggtg

SEQ ID NO: 100441 - DNA, 18 bp, Artificial Sequence
  primer
atcatctcccggcattgg

SEQ ID NO: 100442 - DNA, 21 bp, Artificial Sequence
  primer
tggacattgatcttgtgttgc

SEQ ID NO: 100443 - DNA, 38 bp, Artificial Sequence
  primer
gtaaaacgacggccagtaggaaaggagcatgaggacac

SEQ ID NO: 100444 - DNA, 37 bp, Artificial Sequence
  primer
gtaaaacgacggccagtgagaagagcattgctggctg

SEQ ID NO: 100445 - DNA, 21 bp, Artificial Sequence
  primer
atcccgaactggcagatgtag

SEQ ID NO: 100446 - DNA, 39 bp, Artificial Sequence
  primer
gtaaaacgacggccagtaagctgcaccaactttatttgc

SEQ ID NO: 100447 - DNA, 37 bp, Artificial Sequence
  primer
gtaaaacgacggccagtgcaggccactcaatcttctg

SEQ ID NO: 100448 - DNA, 42 bp, Artificial Sequence
  primer
gtaaaacgacggccagttcatttcagatttctggataagctc

SEQ ID NO: 100449 - DNA, 24 bp, Artificial Sequence
  primer
tgatctacctgggaatcttactgg

SEQ ID NO: 100450 - DNA, 38 bp, Artificial Sequence
  primer
gtaaaacgacggccagtggcttaggagccctttctacc

SEQ ID NO: 100451 - DNA, 38 bp, Artificial Sequence
  primer
gtaaaacgacggccagtaacaatgtgtgcctcataggg

SEQ ID NO: 100452 - DNA, 23 bp, Artificial Sequence
  primer
cacctaaattctatggacctccc

SEQ ID NO: 100453 - DNA, 38 bp, Artificial Sequence
  primer
gtaaaacgacggccagtcttgggtccatacctgtttcc

SEQ ID NO: 100454 - DNA, 40 bp, Artificial Sequence
  primer
gtaaaacgacggccagtaaagaggaacgtgtttcttcagg

SEQ ID NO: 100455 - DNA, 21 bp, Artificial Sequence
  primer
ccagaccctcaggtaatccac

SEQ ID NO: 100456 - DNA, 18 bp, Artificial Sequence
  primer
gggagctgagatcgtgcc

SEQ ID NO: 100457 - DNA, 22 bp, Artificial Sequence
  primer
gggtgatggagtgagactcttg

SEQ ID NO: 100458 - DNA, 20 bp, Artificial Sequence
  primer
tctccagcagtctctggcac

SEQ ID NO: 100459 - DNA, 38 bp, Artificial Sequence
  primer
gtaaaacgacggccagttccttcctcttcaccaacgtc

SEQ ID NO: 100460 - DNA, 21 bp, Artificial Sequence
  primer
ccaccattgaaagacagaagg

SEQ ID NO: 100461 - DNA, 40 bp, Artificial Sequence
  primer
gtaaaacgacggccagttcctggttcactactgacattcc

SEQ ID NO: 100462 - DNA, 20 bp, Artificial Sequence
  primer
aggcagatggagcagatgaa

SEQ ID NO: 100463 - DNA, 22 bp, Artificial Sequence
  primer
cattctggaactgggacatagc

SEQ ID NO: 100464 - DNA, 38 bp, Artificial Sequence
  primer
gtaaaacgacggccagtttctgtgttccaatgacgcac

SEQ ID NO: 100465 - DNA, 22 bp, Artificial Sequence
  primer
ccagcaggctttctggtataag

SEQ ID NO: 100466 - DNA, 38 bp, Artificial Sequence
  primer
gtaaaacgacggccagtcctttgagggcaaagagagtc

SEQ ID NO: 100467 - DNA, 38 bp, Artificial Sequence
  primer
gtaaaacgacggccagttcacctgtcccaaagtcaatc

SEQ ID NO: 100468 - DNA, 22 bp, Artificial Sequence
  primer
aaggtaggcagtgactttaccg

SEQ ID NO: 100469 - DNA, 37 bp, Artificial Sequence
  primer
gtaaaacgacggccagtaccaccaccaataatggacc

SEQ ID NO: 100470 - DNA, 37 bp, Artificial Sequence
  primer
gtaaaacgacggccagtgcacaaatttctcgtgtggg

SEQ ID NO: 100471 - DNA, 19 bp, Artificial Sequence
  primer
cagctcagtgtgcagagcc

SEQ ID NO: 100472 - DNA, 21 bp, Artificial Sequence
  primer
tggaatgatctttctgggagc

SEQ ID NO: 100473 - DNA, 21 bp, Artificial Sequence
  primer
tcagtggtcagagggtaccag

SEQ ID NO: 100474 - DNA, 37 bp, Artificial Sequence
  primer
gtaaaacgacggccagtcctctgcttagcacgtggag

SEQ ID NO: 100475 - DNA, 21 bp, Artificial Sequence
  primer
caccagctctttccaaatgac

SEQ ID NO: 100476 - DNA, 38 bp, Artificial Sequence
  primer
gtaaaacgacggccagttcttaacctctggatctcggc

SEQ ID NO: 100477 - DNA, 21 bp, Artificial Sequence
  primer
tacaactgcccagtttccttg

SEQ ID NO: 100478 - DNA, 38 bp, Artificial Sequence
  primer
gtaaaacgacggccagtaggtctccgtcatacccactg

SEQ ID NO: 100479 - DNA, 20 bp, Artificial Sequence
  primer
atgccacatacatggcacac

SEQ ID NO: 100480 - DNA, 38 bp, Artificial Sequence
  primer
gtaaaacgacggccagtgagctgacttgagatgggtcc

SEQ ID NO: 100481 - DNA, 21 bp, Artificial Sequence
  primer
agcttctaagcggcagagttg

SEQ ID NO: 100482 - DNA, 21 bp, Artificial Sequence
  primer
acggcccaaagatgtacacac

SEQ ID NO: 100483 - DNA, 37 bp, Artificial Sequence
  primer
gtaaaacgacggccagtcactcgagactccatctccg

SEQ ID NO: 100484 - DNA, 18 bp, Artificial Sequence
  primer
gggacttcggagaccagc

SEQ ID NO: 100485 - DNA, 19 bp, Artificial Sequence
  primer
aggatggcacagggtcaag

SEQ ID NO: 100486 - DNA, 20 bp, Artificial Sequence
  primer
cgagaggatgcagtgggtag

SEQ ID NO: 100487 - DNA, 38 bp, Artificial Sequence
  primer
gtaaaacgacggccagttgaggaagccctagaaaggag

SEQ ID NO: 100488 - DNA, 21 bp, Artificial Sequence
  primer
tccctgagatctagccaaagc

SEQ ID NO: 100489 - DNA, 38 bp, Artificial Sequence
  primer
gtaaaacgacggccagtaactctttggcaatcagctcc

SEQ ID NO: 100490 - DNA, 38 bp, Artificial Sequence
  primer
gtaaaacgacggccagtctcttgtggccatgtatctgc

SEQ ID NO: 100491 - DNA, 21 bp, Artificial Sequence
  primer
ggtgtgaggagttcagatccc

SEQ ID NO: 100492 - DNA, 37 bp, Artificial Sequence
  primer
gtaaaacgacggccagtctctcagtcccacctccctc

SEQ ID NO: 100493 - DNA, 38 bp, Artificial Sequence
  primer
gtaaaacgacggccagtccaaatgcagtcttcaaatcg

SEQ ID NO: 100494 - DNA, 21 bp, Artificial Sequence
  primer
agtgcaatgatcgcagttacc

SEQ ID NO: 100495 - DNA, 21 bp, Artificial Sequence
  primer
aaatcctctctgagcacctcc

SEQ ID NO: 100496 - DNA, 21 bp, Artificial Sequence
  primer
tgggtatgaagaccaccttcc

SEQ ID NO: 100497 - DNA, 20 bp, Artificial Sequence
  primer
ttgtgaaggtccaaggatgg

SEQ ID NO: 100498 - DNA, 21 bp, Artificial Sequence
  primer
cacaaccatgcattctgagag

SEQ ID NO: 100499 - DNA, 22 bp, Artificial Sequence
  primer
tcagaaatttccctcagtctgc

SEQ ID NO: 100500 - DNA, 21 bp, Artificial Sequence
  primer
ggtcgttatggtccctttgag

SEQ ID NO: 100501 - DNA, 21 bp, Artificial Sequence
  primer
cacctctccattcctcactcc

SEQ ID NO: 100502 - DNA, 38 bp, Artificial Sequence
  primer
gtaaaacgacggccagttcagcgtttgagctattccag

SEQ ID NO: 100503 - DNA, 38 bp, Artificial Sequence
  primer
gtaaaacgacggccagtcccagtgcagaagaaagaagc

SEQ ID NO: 100504 - DNA, 39 bp, Artificial Sequence
  primer
gtaaaacgacggccagtggctctggctctgaagaattac

SEQ ID NO: 100505 - DNA, 21 bp, Artificial Sequence
  primer
aggaaagtgtggcattccaag

SEQ ID NO: 100506 - DNA, 21 bp, Artificial Sequence
  primer
tctggaggcatgtctagagcc

SEQ ID NO: 100507 - DNA, 35 bp, Artificial Sequence
  primer
gtaaaacgacggccagtattgccagggctttcagg

SEQ ID NO: 100508 - DNA, 38 bp, Artificial Sequence
  primer
gtaaaacgacggccagtgagcaccatctctggaatcag

SEQ ID NO: 100509 - DNA, 24 bp, Artificial Sequence
  primer
gggaaacaggtatctttccatttc

SEQ ID NO: 100510 - DNA, 19 bp, Artificial Sequence
  primer
gtgagccaccatgcctagc

SEQ ID NO: 100511 - DNA, 21 bp, Artificial Sequence
  primer
aacagcaccaacccaatacag

SEQ ID NO: 100512 - DNA, 22 bp, Artificial Sequence
  primer
ttgtcattacctggaatctccc

SEQ ID NO: 100513 - DNA, 38 bp, Artificial Sequence
  primer
gtaaaacgacggccagtttcttagctgctcgacagagg

SEQ ID NO: 100514 - DNA, 21 bp, Artificial Sequence
  primer
gcctctcccttcaatttcttg

SEQ ID NO: 100515 - DNA, 40 bp, Artificial Sequence
  primer
gtaaaacgacggccagtaagagaatgttgatccatcctcc

SEQ ID NO: 100516 - DNA, 39 bp, Artificial Sequence
  primer
gtaaaacgacggccagtgaaatagaatgagggaggcagc

SEQ ID NO: 100517 - DNA, 39 bp, Artificial Sequence
  primer
gtaaaacgacggccagttcagcaccaagaattaaccctc

SEQ ID NO: 100518 - DNA, 41 bp, Artificial Sequence
  primer
gtaaaacgacggccagtcctcaggaaatttctggtgtattc

SEQ ID NO: 100519 - DNA, 24 bp, Artificial Sequence
  primer
gcatttcacggacattacagtacc

SEQ ID NO: 100520 - DNA, 21 bp, Artificial Sequence
  primer
ttatcagtggcatccaagtgc

SEQ ID NO: 100521 - DNA, 21 bp, Artificial Sequence
  primer
attgcacacacacctctttgg

SEQ ID NO: 100522 - DNA, 43 bp, Artificial Sequence
  primer
gtaaaacgacggccagttgtcttatgagaatgagggatttctt

SEQ ID NO: 100523 - DNA, 38 bp, Artificial Sequence
  primer
gtaaaacgacggccagttatcatgctgcttgtcccttg

SEQ ID NO: 100524 - DNA, 21 bp, Artificial Sequence
  primer
ccaggttgctaatttcatggc

SEQ ID NO: 100525 - DNA, 23 bp, Artificial Sequence
  primer
tttgaactgaaatgaatcaccag

SEQ ID NO: 100526 - DNA, 21 bp, Artificial Sequence
  primer
aaatttcatctttgcattcgg

SEQ ID NO: 100527 - DNA, 37 bp, Artificial Sequence
  primer
gtaaaacgacggccagttttattgtgaggcagggtgg

SEQ ID NO: 100528 - DNA, 23 bp, Artificial Sequence
  primer
gccataagaatggttgatctttg

SEQ ID NO: 100529 - DNA, 40 bp, Artificial Sequence
  primer
gtaaaacgacggccagtgaaggcgaattgtaagagctatg

SEQ ID NO: 100530 - DNA, 41 bp, Artificial Sequence
  primer
gtaaaacgacggccagttttctacccgtgctgtcattatac

SEQ ID NO: 100531 - DNA, 44 bp, Artificial Sequence
  primer
gtaaaacgacggccagtaaataaacttcatgggttgtaaacttc

SEQ ID NO: 100532 - DNA, 20 bp, Artificial Sequence
  primer
tccatccgtgtcttcattcc

SEQ ID NO: 100533 - DNA, 26 bp, Artificial Sequence
  primer
gcatcaactgataattagggaagaat

SEQ ID NO: 100534 - DNA, 24 bp, Artificial Sequence
  primer
gagccatctgaataacctacaacc

SEQ ID NO: 100535 - DNA, 25 bp, Artificial Sequence
  primer
tttgtttgtggtatacatatgtcgg

SEQ ID NO: 100536 - DNA, 39 bp, Artificial Sequence
  primer
gtaaaacgacggccagttccttcttgccacagtcacata

SEQ ID NO: 100537 - DNA, 23 bp, Artificial Sequence
  primer
aaagctgagagaaatatggcaaa

SEQ ID NO: 100538 - DNA, 43 bp, Artificial Sequence
  primer
gtaaaacgacggccagtagatattagaaacaggatgtgcagac

SEQ ID NO: 100539 - DNA, 37 bp, Artificial Sequence
  primer
gtaaaacgacggccagtaaagagtgcacgtgggattg

SEQ ID NO: 100540 - DNA, 20 bp, Artificial Sequence
  primer
tcatgacagaaggactcggg

SEQ ID NO: 100541 - DNA, 38 bp, Artificial Sequence
  primer
gtaaaacgacggccagttgtgttggactcagggttcag

SEQ ID NO: 100542 - DNA, 21 bp, Artificial Sequence
  primer
atatctgaacgtccaggtgcc

SEQ ID NO: 100543 - DNA, 23 bp, Artificial Sequence
  primer
tctgccattggtagcaatttatg

SEQ ID NO: 100544 - DNA, 21 bp, Artificial Sequence
  primer
ggaacaagtgctccaggattc

SEQ ID NO: 100545 - DNA, 22 bp, Artificial Sequence
  primer
tctaagaacagtcacacacccg

SEQ ID NO: 100546 - DNA, 38 bp, Artificial Sequence
  primer
gtaaaacgacggccagtaatgctgtaccttggaggagc

SEQ ID NO: 100547 - DNA, 21 bp, Artificial Sequence
  primer
tgtcatttgacatgtaggccc

SEQ ID NO: 100548 - DNA, 20 bp, Artificial Sequence
  primer
gcgagggaatttcagaggag

SEQ ID NO: 100549 - DNA, 21 bp, Artificial Sequence
  primer
aataccgcactggaaggtcac

SEQ ID NO: 100550 - DNA, 38 bp, Artificial Sequence
  primer
gtaaaacgacggccagtttgcagtggtttgccatacag

SEQ ID NO: 100551 - DNA, 38 bp, Artificial Sequence
  primer
gtaaaacgacggccagtggctcagacattactgggagg

SEQ ID NO: 100552 - DNA, 38 bp, Artificial Sequence
  primer
gtaaaacgacggccagttcgctgtcatagagcaggatg

SEQ ID NO: 100553 - DNA, 21 bp, Artificial Sequence
  primer
ggtgttggactccctgtaacg

SEQ ID NO: 100554 - DNA, 37 bp, Artificial Sequence
  primer
gtaaaacgacggccagtctgctggtacagggctaggg

SEQ ID NO: 100555 - DNA, 21 bp, Artificial Sequence
  primer
gaactctttctcctgcatcgc

SEQ ID NO: 100556 - DNA, 37 bp, Artificial Sequence
  primer
gtaaaacgacggccagtatgggaagtgatcccgagac

SEQ ID NO: 100557 - DNA, 18 bp, Artificial Sequence
  primer
ctacgcgctggagacggt

SEQ ID NO: 100558 - DNA, 39 bp, Artificial Sequence
  primer
gtaaaacgacggccagtttgtttgtccataaaccagcag

SEQ ID NO: 100559 - DNA, 38 bp, Artificial Sequence
  primer
gtaaaacgacggccagttcattccaaattaatgctgcg

SEQ ID NO: 100560 - DNA, 21 bp, Artificial Sequence
  primer
cttatgggaatggctggactc

SEQ ID NO: 100561 - DNA, 38 bp, Artificial Sequence
  primer
gtaaaacgacggccagttagggtgcttcaactattgcc

SEQ ID NO: 100562 - DNA, 39 bp, Artificial Sequence
  primer
gtaaaacgacggccagttgctctacaggaaggagtagcc

SEQ ID NO: 100563 - DNA, 20 bp, Artificial Sequence
  primer
gaacctgccttcctccattc

SEQ ID NO: 100564 - DNA, 39 bp, Artificial Sequence
  primer
gtaaaacgacggccagtggatcctgagacacagttctgg

SEQ ID NO: 100565 - DNA, 38 bp, Artificial Sequence
  primer
gtaaaacgacggccagtgcatctgcccgaagttaacac

SEQ ID NO: 100566 - DNA, 21 bp, Artificial Sequence
  primer
atgcctatgggcaaattgaag

SEQ ID NO: 100567 - DNA, 21 bp, Artificial Sequence
  primer
caggttcttgaccaacaggtg

SEQ ID NO: 100568 - DNA, 39 bp, Artificial Sequence
  primer
gtaaaacgacggccagtcctcaaggcagtgatacagagg

SEQ ID NO: 100569 - DNA, 35 bp, Artificial Sequence
  primer
gtaaaacgacggccagtacctcaggcctctgctcc

SEQ ID NO: 100570 - DNA, 34 bp, Artificial Sequence
  primer
gtaaaacgacggccagtccgcctctacgctgtcc

SEQ ID NO: 100571 - DNA, 19 bp, Artificial Sequence
  primer
tcttcggacccctttaccc

SEQ ID NO: 100572 - DNA, 38 bp, Artificial Sequence
  primer
gtaaaacgacggccagtgataccaccaagggttcctcc

SEQ ID NO: 100573 - DNA, 21 bp, Artificial Sequence
  primer
agactccgactgaggatggac

SEQ ID NO: 100574 - DNA, 22 bp, Artificial Sequence
  primer
tgcccagagctttagaactgac

SEQ ID NO: 100575 - DNA, 21 bp, Artificial Sequence
  primer
acccactgggaaatagatggg

SEQ ID NO: 100576 - DNA, 39 bp, Artificial Sequence
  primer
gtaaaacgacggccagtcttctgtgtgtgtgaaagctgg

SEQ ID NO: 100577 - DNA, 21 bp, Artificial Sequence
  primer
tgaaggaattgaacccaaacc

SEQ ID NO: 100578 - DNA, 38 bp, Artificial Sequence
  primer
gtaaaacgacggccagtccagaattctcccaccatcac

SEQ ID NO: 100579 - DNA, 22 bp, Artificial Sequence
  primer
gcagaatctgtgagtaccaggg

SEQ ID NO: 100580 - DNA, 38 bp, Artificial Sequence
  primer
gtaaaacgacggccagtcctgggcttcagggactatac

SEQ ID NO: 100581 - DNA, 21 bp, Artificial Sequence
  primer
ctcagatcaccgtcctccttc

SEQ ID NO: 100582 - DNA, 37 bp, Artificial Sequence
  primer
gtaaaacgacggccagtagagacctgctggagggaag

SEQ ID NO: 100583 - DNA, 20 bp, Artificial Sequence
  primer
gcagctccaagggattaagg

SEQ ID NO: 100584 - DNA, 38 bp, Artificial Sequence
  primer
gtaaaacgacggccagttatttcccagtcagcagcatc

SEQ ID NO: 100585 - DNA, 21 bp, Artificial Sequence
  primer
ggcctgaggagaaactgagtc

SEQ ID NO: 100586 - DNA, 21 bp, Artificial Sequence
  primer
accagtaacctgcagcacgag

SEQ ID NO: 100587 - DNA, 21 bp, Artificial Sequence
  primer
agggatctatgaggaaagggc

SEQ ID NO: 100588 - DNA, 38 bp, Artificial Sequence
  primer
gtaaaacgacggccagtatacctgagaacccatgaccc

SEQ ID NO: 100589 - DNA, 22 bp, Artificial Sequence
  primer
ttcctaacctctctttccagcc

SEQ ID NO: 100590 - DNA, 21 bp, Artificial Sequence
  primer
cagggaatctctttctgggtg

SEQ ID NO: 100591 - DNA, 21 bp, Artificial Sequence
  primer
caagacagcacctagactccc

SEQ ID NO: 100592 - DNA, 21 bp, Artificial Sequence
  primer
tccaatgcacaaacacagaaa

SEQ ID NO: 100593 - DNA, 21 bp, Artificial Sequence
  primer
gatttccaaatccctgaaagc

SEQ ID NO: 100594 - DNA, 22 bp, Artificial Sequence
  primer
ggcctaacaacagtgtccagtt

SEQ ID NO: 100595 - DNA, 37 bp, Artificial Sequence
  primer
gtaaaacgacggccagtcatctggacacagcggctac

SEQ ID NO: 100596 - DNA, 24 bp, Artificial Sequence
  primer
ggtggatatcctacttgctgaatg

SEQ ID NO: 100597 - DNA, 37 bp, Artificial Sequence
  primer
gtaaaacgacggccagtaggtgcgttcatcacgtttc

SEQ ID NO: 100598 - DNA, 20 bp, Artificial Sequence
  primer
cttgctcaaattcccagagc

SEQ ID NO: 100599 - DNA, 38 bp, Artificial Sequence
  primer
gtaaaacgacggccagtaacaaactcgccaatgattcc

SEQ ID NO: 100600 - DNA, 20 bp, Artificial Sequence
  primer
aggagggagagcttgcattg

SEQ ID NO: 100601 - DNA, 21 bp, Artificial Sequence
  primer
gagcctaggatgcagaggttg

SEQ ID NO: 100602 - DNA, 39 bp, Artificial Sequence
  primer
gtaaaacgacggccagttgaaccaaattacccaaacaaa

SEQ ID NO: 100603 - DNA, 22 bp, Artificial Sequence
  primer
cagccagctacttaaggcaatg

SEQ ID NO: 100604 - DNA, 20 bp, Artificial Sequence
  primer
cccttcaagagtcggagagc

SEQ ID NO: 100605 - DNA, 38 bp, Artificial Sequence
  primer
gtaaaacgacggccagtaaaggcaagaggctgtgactc

SEQ ID NO: 100606 - DNA, 38 bp, Artificial Sequence
  primer
gtaaaacgacggccagtcctgtaagttggcaggagagg

SEQ ID NO: 100607 - DNA, 21 bp, Artificial Sequence
  primer
cctgtctgcctaaaccaggtc

SEQ ID NO: 100608 - DNA, 36 bp, Artificial Sequence
  primer
gtaaaacgacggccagtaccagtgcacaaccgacag

SEQ ID NO: 100609 - DNA, 18 bp, Artificial Sequence
  primer
aaacaaagggctcggcag

SEQ ID NO: 100610 - DNA, 21 bp, Artificial Sequence
  primer
aactctgggtgagaatgggag

SEQ ID NO: 100611 - DNA, 38 bp, Artificial Sequence
  primer
gtaaaacgacggccagtctgagtaggcaggtcctcagc

SEQ ID NO: 100612 - DNA, 21 bp, Artificial Sequence
  primer
tgtgttctcatcccaatccag

SEQ ID NO: 100613 - DNA, 38 bp, Artificial Sequence
  primer
gtaaaacgacggccagtaaccctctgcttgtgaagagc

SEQ ID NO: 100614 - DNA, 21 bp, Artificial Sequence
  primer
ggagtgaactctggctcgttc

SEQ ID NO: 100615 - DNA, 21 bp, Artificial Sequence
  primer
cctcccactccttgcagatac

SEQ ID NO: 100616 - DNA, 38 bp, Artificial Sequence
  primer
gtaaaacgacggccagtaggtgaggttagtggaggagc

SEQ ID NO: 100617 - DNA, 21 bp, Artificial Sequence
  primer
agccctacacctggaccagac

SEQ ID NO: 100618 - DNA, 21 bp, Artificial Sequence
  primer
attcaggcaattactggtggc

SEQ ID NO: 100619 - DNA, 21 bp, Artificial Sequence
  primer
cacataactgcaggacccaag

SEQ ID NO: 100620 - DNA, 21 bp, Artificial Sequence
  primer
agcaagacctttgccacactc

SEQ ID NO: 100621 - DNA, 38 bp, Artificial Sequence
  primer
gtaaaacgacggccagtgagattcccacccaaagacag

SEQ ID NO: 100622 - DNA, 21 bp, Artificial Sequence
  primer
ggatgctggtgttcttcactg

SEQ ID NO: 100623 - DNA, 21 bp, Artificial Sequence
  primer
tggtctgagaaactctgcctg

SEQ ID NO: 100624 - DNA, 21 bp, Artificial Sequence
  primer
ctgtcttctcatccatgtggg

SEQ ID NO: 100625 - DNA, 22 bp, Artificial Sequence
  primer
ggactgtccagcaaagactcac

SEQ ID NO: 100626 - DNA, 21 bp, Artificial Sequence
  primer
ctgctgtatgtctgcccagtg

SEQ ID NO: 100627 - DNA, 38 bp, Artificial Sequence
  primer
gtaaaacgacggccagtacattgcactgttcattgggt

SEQ ID NO: 100628 - DNA, 37 bp, Artificial Sequence
  primer
gtaaaacgacggccagtctgtagcctcagcgcctatc

SEQ ID NO: 100629 - DNA, 23 bp, Artificial Sequence
  primer
gctacaagaatttggaggtttcc

SEQ ID NO: 100630 - DNA, 40 bp, Artificial Sequence
  primer
gtaaaacgacggccagtagcaatgaagagttctttagccc

SEQ ID NO: 100631 - DNA, 21 bp, Artificial Sequence
  primer
ctagctaggtgtggtggcagg

SEQ ID NO: 100632 - DNA, 39 bp, Artificial Sequence
  primer
gtaaaacgacggccagtgaccatgatgatcaaaccattc

SEQ ID NO: 100633 - DNA, 18 bp, Artificial Sequence
  primer
cttgctgggacccgagag

SEQ ID NO: 100634 - DNA, 22 bp, Artificial Sequence
  primer
aaaggccagcacatgaattatc

SEQ ID NO: 100635 - DNA, 23 bp, Artificial Sequence
  primer
cctggaatatctttcccagacag

SEQ ID NO: 100636 - DNA, 26 bp, Artificial Sequence
  primer
tgaaccatgtgttacaaacactaatc

SEQ ID NO: 100637 - DNA, 28 bp, Artificial Sequence
  primer
gatgaagttagaagttacctccagtaca

SEQ ID NO: 100638 - DNA, 38 bp, Artificial Sequence
  primer
gtaaaacgacggccagttcttcgaaccaggtcaaacag

SEQ ID NO: 100639 - DNA, 40 bp, Artificial Sequence
  primer
gtaaaacgacggccagttgcattatcaagaccatacttgc

SEQ ID NO: 100640 - DNA, 20 bp, Artificial Sequence
  primer
attaccaacacacgcgcaac

SEQ ID NO: 100641 - DNA, 21 bp, Artificial Sequence
  primer
ggcaaccaaagcgtatctctc

SEQ ID NO: 100642 - DNA, 21 bp, Artificial Sequence
  primer
acaaatgttggcagtgtagcc

SEQ ID NO: 100643 - DNA, 37 bp, Artificial Sequence
  primer
gtaaaacgacggccagtgaggcatcatttgggacaag

SEQ ID NO: 100644 - DNA, 21 bp, Artificial Sequence
  primer
ttcgttggccttattggtatg

SEQ ID NO: 100645 - DNA, 21 bp, Artificial Sequence
  primer
catctcttcccaatcctgagc

SEQ ID NO: 100646 - DNA, 41 bp, Artificial Sequence
  primer
gtaaaacgacggccagtggatatgtccaggtatttgtgttg

SEQ ID NO: 100647 - DNA, 39 bp, Artificial Sequence
  primer
gtaaaacgacggccagtcacggagtcagggactatgttc

SEQ ID NO: 100648 - DNA, 38 bp, Artificial Sequence
  primer
gtaaaacgacggccagtgcctcactgcctcccttaatc

SEQ ID NO: 100649 - DNA, 21 bp, Artificial Sequence
  primer
gggcacatacataactggcac

SEQ ID NO: 100650 - DNA, 20 bp, Artificial Sequence
  primer
tttccacatgggacagcaag

SEQ ID NO: 100651 - DNA, 37 bp, Artificial Sequence
  primer
gtaaaacgacggccagtaagggacttgggagcaactg

SEQ ID NO: 100652 - DNA, 38 bp, Artificial Sequence
  primer
gtaaaacgacggccagtggatccttgtaggtgtcagcc

SEQ ID NO: 100653 - DNA, 38 bp, Artificial Sequence
  primer
gtaaaacgacggccagtagcaacctcaactgccaagac

SEQ ID NO: 100654 - DNA, 38 bp, Artificial Sequence
  primer
gtaaaacgacggccagtggaactttgttgaaagcctgg

SEQ ID NO: 100655 - DNA, 21 bp, Artificial Sequence
  primer
cctggaggtcatcgtcttctc

SEQ ID NO: 100656 - DNA, 38 bp, Artificial Sequence
  primer
gtaaaacgacggccagtcaggtctggcatatagccctc

SEQ ID NO: 100657 - DNA, 38 bp, Artificial Sequence
  primer
gtaaaacgacggccagtctatcaagtttcccaggcagg

SEQ ID NO: 100658 - DNA, 21 bp, Artificial Sequence
  primer
gctgtatttcccttgctgtcc

SEQ ID NO: 100659 - DNA, 21 bp, Artificial Sequence
  primer
ttatagcaaggaggcctttgg

SEQ ID NO: 100660 - DNA, 38 bp, Artificial Sequence
  primer
gtaaaacgacggccagtagcagtgggagaataaccacc

SEQ ID NO: 100661 - DNA, 20 bp, Artificial Sequence
  primer
cggaggtcctcaactgtctg

SEQ ID NO: 100662 - DNA, 37 bp, Artificial Sequence
  primer
gtaaaacgacggccagttgatggtccaacagagggag

SEQ ID NO: 100663 - DNA, 21 bp, Artificial Sequence
  primer
ctcctttgcgcagcttaactc

SEQ ID NO: 100664 - DNA, 37 bp, Artificial Sequence
  primer
gtaaaacgacggccagtcccagccagagactggaaac

SEQ ID NO: 100665 - DNA, 20 bp, Artificial Sequence
  primer
tacaagtgtgagccagtgcg

SEQ ID NO: 100666 - DNA, 21 bp, Artificial Sequence
  primer
aagcttccagcagcacaaatc

SEQ ID NO: 100667 - DNA, 21 bp, Artificial Sequence
  primer
ggagactcttcccacaaatgc

SEQ ID NO: 100668 - DNA, 38 bp, Artificial Sequence
  primer
gtaaaacgacggccagttgggaaggagaacacaggaac

SEQ ID NO: 100669 - DNA, 21 bp, Artificial Sequence
  primer
aggctggtttcctgaccttag

SEQ ID NO: 100670 - DNA, 21 bp, Artificial Sequence
  primer
cgacaaggtcttgctctgttg

SEQ ID NO: 100671 - DNA, 38 bp, Artificial Sequence
  primer
gtaaaacgacggccagtccctcacttacaagtccctgg

SEQ ID NO: 100672 - DNA, 38 bp, Artificial Sequence
  primer
gtaaaacgacggccagttcctcttaccagcggtattgc

SEQ ID NO: 100673 - DNA, 20 bp, Artificial Sequence
  primer
cagcctggtacagcatctgg

SEQ ID NO: 100674 - DNA, 38 bp, Artificial Sequence
  primer
gtaaaacgacggccagtcactgatagtgggaagcaggg

SEQ ID NO: 100675 - DNA, 21 bp, Artificial Sequence
  primer
gaggcttcagtcccagacatc

SEQ ID NO: 100676 - DNA, 38 bp, Artificial Sequence
  primer
gtaaaacgacggccagtcagttcatggagggtctctgg

SEQ ID NO: 100677 - DNA, 20 bp, Artificial Sequence
  primer
acacaaaccacggtgagcag

SEQ ID NO: 100678 - DNA, 25 bp, Artificial Sequence
  primer
ggtgattacatttgttgttgtcaag

SEQ ID NO: 100679 - DNA, 22 bp, Artificial Sequence
  primer
cccaaagtttaatggttccaaa

SEQ ID NO: 100680 - DNA, 21 bp, Artificial Sequence
  primer
gttggcaaatgtggtttgaag

SEQ ID NO: 100681 - DNA, 21 bp, Artificial Sequence
  primer
tatgcaccaaggaagaaaggc

SEQ ID NO: 100682 - DNA, 38 bp, Artificial Sequence
  primer
gtaaaacgacggccagtaggtcactcggcaaattcaag

SEQ ID NO: 100683 - DNA, 21 bp, Artificial Sequence
  primer
acagggcttagcatcaccttc

SEQ ID NO: 100684 - DNA, 38 bp, Artificial Sequence
  primer
gtaaaacgacggccagtcctttggtgaaaggacaggtg

SEQ ID NO: 100685 - DNA, 21 bp, Artificial Sequence
  primer
gggatgagactcaacacatgg

SEQ ID NO: 100686 - DNA, 21 bp, Artificial Sequence
  primer
agacacaagaagaagcacggg

SEQ ID NO: 100687 - DNA, 21 bp, Artificial Sequence
  primer
ctctggttacacacccacacc

SEQ ID NO: 100688 - DNA, 21 bp, Artificial Sequence
  primer
ggtcccagaagaccttctctc

SEQ ID NO: 100689 - DNA, 21 bp, Artificial Sequence
  primer
gaggcacatgtcatcttctgc

SEQ ID NO: 100690 - DNA, 38 bp, Artificial Sequence
  primer
gtaaaacgacggccagttgttgagtttatggcagcgtc

SEQ ID NO: 100691 - DNA, 43 bp, Artificial Sequence
  primer
gtaaaacgacggccagtaacattcactgcctcattaattcaaa

SEQ ID NO: 100692 - DNA, 20 bp, Artificial Sequence
  primer
tccacccgctacaggtatcc

SEQ ID NO: 100693 - DNA, 18 bp, Artificial Sequence
  primer
cctgaccttgtgatccgc

SEQ ID NO: 100694 - DNA, 21 bp, Artificial Sequence
  primer
tggtggtaaaggtgagaggtg

SEQ ID NO: 100695 - DNA, 38 bp, Artificial Sequence
  primer
gtaaaacgacggccagtctaggaggcagaggttgcagt

SEQ ID NO: 100696 - DNA, 22 bp, Artificial Sequence
  primer
cttctactttcttgcgcacatt

SEQ ID NO: 100697 - DNA, 38 bp, Artificial Sequence
  primer
gtaaaacgacggccagttgagctaggatcatgccactg

SEQ ID NO: 100698 - DNA, 21 bp, Artificial Sequence
  primer
atgctgctgactttgcctctg

SEQ ID NO: 100699 - DNA, 26 bp, Artificial Sequence
  primer
caatattctaagttcttccaccttgc

SEQ ID NO: 100700 - DNA, 39 bp, Artificial Sequence
  primer
gtaaaacgacggccagttccaatcttaagcatctctgcc

SEQ ID NO: 100701 - DNA, 23 bp, Artificial Sequence
  primer
cacctggatattaagtcaccctg

SEQ ID NO: 100702 - DNA, 39 bp, Artificial Sequence
  primer
gtaaaacgacggccagtagtccacttcccagtgctttag

SEQ ID NO: 100703 - DNA, 24 bp, Artificial Sequence
  primer
aaggacctaatagggcatatggag

SEQ ID NO: 100704 - DNA, 26 bp, Artificial Sequence
  primer
gggaaatatgtatcatcagttatgcc

SEQ ID NO: 100705 - DNA, 38 bp, Artificial Sequence
  primer
gtaaaacgacggccagtcacctcaatgtctgcaggaag

SEQ ID NO: 100706 - DNA, 22 bp, Artificial Sequence
  primer
ttgcccttgatccattaatttc

SEQ ID NO: 100707 - DNA, 40 bp, Artificial Sequence
  primer
gtaaaacgacggccagtccagatatagagctcacgtgctt

SEQ ID NO: 100708 - DNA, 43 bp, Artificial Sequence
  primer
gtaaaacgacggccagtttgtagctctttaacaacttacgcat

SEQ ID NO: 100709 - DNA, 23 bp, Artificial Sequence
  primer
gatcagacacatctctcatccaa

SEQ ID NO: 100710 - DNA, 38 bp, Artificial Sequence
  primer
gtaaaacgacggccagtgaagcgtttgatgagaaatgc

SEQ ID NO: 100711 - DNA, 42 bp, Artificial Sequence
  primer
gtaaaacgacggccagtaaggaccaatacatatgacaaccac

SEQ ID NO: 100712 - DNA, 20 bp, Artificial Sequence
  primer
gctgtggctacaggtgcttg

SEQ ID NO: 100713 - DNA, 41 bp, Artificial Sequence
  primer
gtaaaacgacggccagtggatgttgacagaaataccctcag

SEQ ID NO: 100714 - DNA, 25 bp, Artificial Sequence
  primer
tcattagagctttatttctgcttca

SEQ ID NO: 100715 - DNA, 21 bp, Artificial Sequence
  primer
aagaacattggctgcagtgag

SEQ ID NO: 100716 - DNA, 43 bp, Artificial Sequence
  primer
gtaaaacgacggccagtcactcacaaatctgttcacttaatgc

SEQ ID NO: 100717 - DNA, 38 bp, Artificial Sequence
  primer
gtaaaacgacggccagttttccctcctttcctcaggtc

SEQ ID NO: 100718 - DNA, 39 bp, Artificial Sequence
  primer
gtaaaacgacggccagtgggtagaaagatggaggtgagg

SEQ ID NO: 100719 - DNA, 37 bp, Artificial Sequence
  primer
gtaaaacgacggccagtagagccgaggagcagagaag

SEQ ID NO: 100720 - DNA, 38 bp, Artificial Sequence
  primer
gtaaaacgacggccagtttcccagagagagaacatccc

SEQ ID NO: 100721 - DNA, 36 bp, Artificial Sequence
  primer
gtaaaacgacggccagtgacttccgcccagtcagtc

SEQ ID NO: 100722 - DNA, 20 bp, Artificial Sequence
  primer
ggagaagccctggcttagag

SEQ ID NO: 100723 - DNA, 19 bp, Artificial Sequence
  primer
ctccaagcccagcaacaag

SEQ ID NO: 100724 - DNA, 38 bp, Artificial Sequence
  primer
gtaaaacgacggccagtatcagaggtcaaggtccaagc

SEQ ID NO: 100725 - DNA, 21 bp, Artificial Sequence
  primer
ctcaacattcagtgtccaggc

SEQ ID NO: 100726 - DNA, 21 bp, Artificial Sequence
  primer
atatgctggtcaaggaggtgg

SEQ ID NO: 100727 - DNA, 21 bp, Artificial Sequence
  primer
cgtgacaagaggtaggacacg

SEQ ID NO: 100728 - DNA, 21 bp, Artificial Sequence
  primer
ccagaacaggttcagggagac

SEQ ID NO: 100729 - DNA, 38 bp, Artificial Sequence
  primer
gtaaaacgacggccagtagtgagcaaggacctggtctg

SEQ ID NO: 100730 - DNA, 20 bp, Artificial Sequence
  primer
gtcacagaccatgtgagccc

SEQ ID NO: 100731 - DNA, 21 bp, Artificial Sequence
  primer
ctcctggacttgggatttgtc

SEQ ID NO: 100732 - DNA, 21 bp, Artificial Sequence
  primer
gtggttcagtggtggtgacag

SEQ ID NO: 100733 - DNA, 39 bp, Artificial Sequence
  primer
gtaaaacgacggccagtgagaagacaaggagatggaccc

SEQ ID NO: 100734 - DNA, 36 bp, Artificial Sequence
  primer
gtaaaacgacggccagttggcacacttcctcttggc

SEQ ID NO: 100735 - DNA, 36 bp, Artificial Sequence
  primer
gtaaaacgacggccagtggtgggaatttctgggttg

SEQ ID NO: 100736 - DNA, 36 bp, Artificial Sequence
  primer
gtaaaacgacggccagttcagtcctgggagtgaggc

SEQ ID NO: 100737 - DNA, 38 bp, Artificial Sequence
  primer
gtaaaacgacggccagtacaggctgtaaagcatgggtc

SEQ ID NO: 100738 - DNA, 21 bp, Artificial Sequence
  primer
ctatatcccagctctgcccac

SEQ ID NO: 100739 - DNA, 22 bp, Artificial Sequence
  primer
ccaccgttggtagaggtagatg

SEQ ID NO: 100740 - DNA, 18 bp, Artificial Sequence
  primer
ggcctgatctgtccaggg

SEQ ID NO: 100741 - DNA, 21 bp, Artificial Sequence
  primer
tacttccaatttgagcaacgg

SEQ ID NO: 100742 - DNA, 42 bp, Artificial Sequence
  primer
gtaaaacgacggccagtttactgcttactatgtgcaatgctt

SEQ ID NO: 100743 - DNA, 21 bp, Artificial Sequence
  primer
cgtttgcacctggcctatatt

SEQ ID NO: 100744 - DNA, 39 bp, Artificial Sequence
  primer
gtaaaacgacggccagtgtgtaaacttgggagagggaag

SEQ ID NO: 100745 - DNA, 21 bp, Artificial Sequence
  primer
gggaataacctgcactttgaa

SEQ ID NO: 100746 - DNA, 24 bp, Artificial Sequence
  primer
tggaaacgacacaaattagctatg

SEQ ID NO: 100747 - DNA, 40 bp, Artificial Sequence
  primer
gtaaaacgacggccagtaagagccgtaatacttcaatcgc

SEQ ID NO: 100748 - DNA, 38 bp, Artificial Sequence
  primer
gtaaaacgacggccagtaggcaaagcaaactatgtggc

SEQ ID NO: 100749 - DNA, 26 bp, Artificial Sequence
  primer
gaatctaattgaatgtgaaaccaaac

SEQ ID NO: 100750 - DNA, 22 bp, Artificial Sequence
  primer
ccgcagatatgagaatggaaac

SEQ ID NO: 100751 - DNA, 25 bp, Artificial Sequence
  primer
ggaataggctggtattctagatgag

SEQ ID NO: 100752 - DNA, 21 bp, Artificial Sequence
  primer
aaggtgggaagactgcttgag

SEQ ID NO: 100753 - DNA, 26 bp, Artificial Sequence
  primer
aaacttgagattattgcttcccttag

SEQ ID NO: 100754 - DNA, 42 bp, Artificial Sequence
  primer
gtaaaacgacggccagtagatccaatgcctttaatatcagac

SEQ ID NO: 100755 - DNA, 18 bp, Artificial Sequence
  primer
aggaaccggctgaagagg

SEQ ID NO: 100756 - DNA, 24 bp, Artificial Sequence
  primer
gcaattaaccaggcaatatggtag

SEQ ID NO: 100757 - DNA, 23 bp, Artificial Sequence
  primer
tgtaactttcatcactgtctgcc

SEQ ID NO: 100758 - DNA, 21 bp, Artificial Sequence
  primer
ctaagcaaggtttcacttgcg

SEQ ID NO: 100759 - DNA, 40 bp, Artificial Sequence
  primer
gtaaaacgacggccagtcagagagcagaaacaacctcaag

SEQ ID NO: 100760 - DNA, 26 bp, Artificial Sequence
  primer
gctgaaacacttaagtcaactgacac

SEQ ID NO: 100761 - DNA, 41 bp, Artificial Sequence
  primer
gtaaaacgacggccagtacaaagcaatatgatgggtaacag

SEQ ID NO: 100762 - DNA, 21 bp, Artificial Sequence
  primer
ccaagggctttagaacaatgg

SEQ ID NO: 100763 - DNA, 41 bp, Artificial Sequence
  primer
gtaaaacgacggccagtagaagagaaattgagctggagttg

SEQ ID NO: 100764 - DNA, 38 bp, Artificial Sequence
  primer
gtaaaacgacggccagtggataatcactccagggaggc

SEQ ID NO: 100765 - DNA, 38 bp, Artificial Sequence
  primer
gtaaaacgacggccagtctcctgtgttctctgtcctcg

SEQ ID NO: 100766 - DNA, 38 bp, Artificial Sequence
  primer
gtaaaacgacggccagttgtgctacacgtgaatcatgc

SEQ ID NO: 100767 - DNA, 22 bp, Artificial Sequence
  primer
ggtagttaccctcatcatgccc

SEQ ID NO: 100768 - DNA, 20 bp, Artificial Sequence
  primer
ccagtttgctaggctgcttg

SEQ ID NO: 100769 - DNA, 41 bp, Artificial Sequence
  primer
gtaaaacgacggccagtaaacatggaaacttaccgtactgc

SEQ ID NO: 100770 - DNA, 23 bp, Artificial Sequence
  primer
ggctgggacaaactttatttagc

SEQ ID NO: 100771 - DNA, 39 bp, Artificial Sequence
  primer
gtaaaacgacggccagtgcacagatggagtgacagaagc

SEQ ID NO: 100772 - DNA, 38 bp, Artificial Sequence
  primer
gtaaaacgacggccagtcgatccatccaacttagcctc

SEQ ID NO: 100773 - DNA, 22 bp, Artificial Sequence
  primer
tgagactcaaatccactgcaag

SEQ ID NO: 100774 - DNA, 39 bp, Artificial Sequence
  primer
gtaaaacgacggccagttgcccaaatacctcattctagg

SEQ ID NO: 100775 - DNA, 38 bp, Artificial Sequence
  primer
gtaaaacgacggccagtttgacctgtgtcaccaagacc

SEQ ID NO: 100776 - DNA, 37 bp, Artificial Sequence
  primer
gtaaaacgacggccagtcattctggctggttacaggg

SEQ ID NO: 100777 - DNA, 38 bp, Artificial Sequence
  primer
gtaaaacgacggccagttcctgaactcctgaccttgtg

SEQ ID NO: 100778 - DNA, 42 bp, Artificial Sequence
  primer
gtaaaacgacggccagtcaaacatgaagagaactgtctatgg

SEQ ID NO: 100779 - DNA, 37 bp, Artificial Sequence
  primer
gtaaaacgacggccagtctcccaccacctctgtgaag

SEQ ID NO: 100780 - DNA, 39 bp, Artificial Sequence
  primer
gtaaaacgacggccagttctggtatcaaatcccaagtgc

SEQ ID NO: 100781 - DNA, 39 bp, Artificial Sequence
  primer
gtaaaacgacggccagttttcaacattgcagcatagagg

SEQ ID NO: 100782 - DNA, 38 bp, Artificial Sequence
  primer
gtaaaacgacggccagtagaaggaaggatcattggctg

SEQ ID NO: 100783 - DNA, 38 bp, Artificial Sequence
  primer
gtaaaacgacggccagtcccttgttccgtgagtaggac

SEQ ID NO: 100784 - DNA, 37 bp, Artificial Sequence
  primer
gtaaaacgacggccagttccagacctcatgatctgcc

SEQ ID NO: 100785 - DNA, 38 bp, Artificial Sequence
  primer
gtaaaacgacggccagtccagccatttactccaagtcc

SEQ ID NO: 100786 - DNA, 35 bp, Artificial Sequence
  primer
gtaaaacgacggccagtcacagtctcctgcgccct

SEQ ID NO: 100787 - DNA, 38 bp, Artificial Sequence
  primer
gtaaaacgacggccagtcagaaacgctcagcattaccc

SEQ ID NO: 100788 - DNA, 20 bp, Artificial Sequence
  primer
agacatgattcctgccctcc

SEQ ID NO: 100789 - DNA, 38 bp, Artificial Sequence
  primer
gtaaaacgacggccagtgcaaacacacaccaggttagg

SEQ ID NO: 100790 - DNA, 21 bp, Artificial Sequence
  primer
tcctgtgttggtccacaagtc

SEQ ID NO: 100791 - DNA, 37 bp, Artificial Sequence
  primer
gtaaaacgacggccagtaaactagccagcaaggcagc

SEQ ID NO: 100792 - DNA, 19 bp, Artificial Sequence
  primer
ggaaaggagagggagcctg

SEQ ID NO: 100793 - DNA, 19 bp, Artificial Sequence
  primer
ctgggctcaagcaatcctc

SEQ ID NO: 100794 - DNA, 21 bp, Artificial Sequence
  primer
gatccaggacacgagggtaag

SEQ ID NO: 100795 - DNA, 21 bp, Artificial Sequence
  primer
gaagcagctcagatggtgtcc

SEQ ID NO: 100796 - DNA, 21 bp, Artificial Sequence
  primer
gaataagccagtaaccgcagg

SEQ ID NO: 100797 - DNA, 38 bp, Artificial Sequence
  primer
gtaaaacgacggccagtcgatggctcacctttccttac

SEQ ID NO: 100798 - DNA, 38 bp, Artificial Sequence
  primer
gtaaaacgacggccagtatcccacagagacaaagagcc

SEQ ID NO: 100799 - DNA, 20 bp, Artificial Sequence
  primer
caacaatgatcccagcgaac

SEQ ID NO: 100800 - DNA, 21 bp, Artificial Sequence
  primer
ggcgtttgtgaatattagggc

SEQ ID NO: 100801 - DNA, 38 bp, Artificial Sequence
  primer
gtaaaacgacggccagtagtttccttgtgtgtgatggg

SEQ ID NO: 100802 - DNA, 21 bp, Artificial Sequence
  primer
ggaaagcatgtgaacctgaag

SEQ ID NO: 100803 - DNA, 21 bp, Artificial Sequence
  primer
acacctactggccgaaatgac

SEQ ID NO: 100804 - DNA, 20 bp, Artificial Sequence
  primer
taggtccttgccgctttcac

SEQ ID NO: 100805 - DNA, 38 bp, Artificial Sequence
  primer
gtaaaacgacggccagtagccatattctgggctttgtg

SEQ ID NO: 100806 - DNA, 21 bp, Artificial Sequence
  primer
gttggagcaccattgtgtgac

SEQ ID NO: 100807 - DNA, 38 bp, Artificial Sequence
  primer
gtaaaacgacggccagtcatattcagagcccatgttgg

SEQ ID NO: 100808 - DNA, 21 bp, Artificial Sequence
  primer
gggcacatgaggttagaggag

SEQ ID NO: 100809 - DNA, 21 bp, Artificial Sequence
  primer
ggaagggagggttgattcttg

SEQ ID NO: 100810 - DNA, 21 bp, Artificial Sequence
  primer
tttcttccacatcctccttgg

SEQ ID NO: 100811 - DNA, 38 bp, Artificial Sequence
  primer
gtaaaacgacggccagtgctgtgtgtctccctaagctg

SEQ ID NO: 100812 - DNA, 25 bp, Artificial Sequence
  primer
agactattctcacaccacttgcttt

SEQ ID NO: 100813 - DNA, 39 bp, Artificial Sequence
  primer
gtaaaacgacggccagtttgttgccatttctgtgtaacg

SEQ ID NO: 100814 - DNA, 20 bp, Artificial Sequence
  primer
tgtgagggaacattcccaag

SEQ ID NO: 100815 - DNA, 21 bp, Artificial Sequence
  primer
gctaagccatccattcacctc

SEQ ID NO: 100816 - DNA, 21 bp, Artificial Sequence
  primer
ttcacagtgctccttcacagg

SEQ ID NO: 100817 - DNA, 38 bp, Artificial Sequence
  primer
gtaaaacgacggccagtgtgggccagttacagcatttc

SEQ ID NO: 100818 - DNA, 21 bp, Artificial Sequence
  primer
agttctgggcacctacgtttg

SEQ ID NO: 100819 - DNA, 38 bp, Artificial Sequence
  primer
gtaaaacgacggccagttaggcataggaagggttgagc

SEQ ID NO: 100820 - DNA, 23 bp, Artificial Sequence
  primer
ggtgaggtatgatagacatgggc

SEQ ID NO: 100821 - DNA, 21 bp, Artificial Sequence
  primer
gatcagaagagggccagacac

SEQ ID NO: 100822 - DNA, 21 bp, Artificial Sequence
  primer
ctcatcactcccaggaccttc

SEQ ID NO: 100823 - DNA, 19 bp, Artificial Sequence
  primer
acagaggatggtgggcttg

SEQ ID NO: 100824 - DNA, 38 bp, Artificial Sequence
  primer
gtaaaacgacggccagtaaagtggagaatgcaaccctg

SEQ ID NO: 100825 - DNA, 21 bp, Artificial Sequence
  primer
tatcatccaagccctagcctg

SEQ ID NO: 100826 - DNA, 38 bp, Artificial Sequence
  primer
gtaaaacgacggccagtatggccagtggtgatgtaaag

SEQ ID NO: 100827 - DNA, 21 bp, Artificial Sequence
  primer
tgttcacagtcacacactggg

SEQ ID NO: 100828 - DNA, 21 bp, Artificial Sequence
  primer
ctgggagtagaatggtcaggg

SEQ ID NO: 100829 - DNA, 37 bp, Artificial Sequence
  primer
gtaaaacgacggccagtctgcagagagatgcaggagg

SEQ ID NO: 100830 - DNA, 38 bp, Artificial Sequence
  primer
gtaaaacgacggccagttgcctctagccttaccactcc

SEQ ID NO: 100831 - DNA, 37 bp, Artificial Sequence
  primer
gtaaaacgacggccagtagggcatggttgaaggtctc

SEQ ID NO: 100832 - DNA, 21 bp, Artificial Sequence
  primer
atgcctagctctaggtgacgc

SEQ ID NO: 100833 - DNA, 38 bp, Artificial Sequence
  primer
gtaaaacgacggccagtacacaggatggagtcgctttc

SEQ ID NO: 100834 - DNA, 21 bp, Artificial Sequence
  primer
cagaggatcttccaggctagg

SEQ ID NO: 100835 - DNA, 37 bp, Artificial Sequence
  primer
gtaaaacgacggccagtgtccatgcccaccaactaac

SEQ ID NO: 100836 - DNA, 37 bp, Artificial Sequence
  primer
gtaaaacgacggccagtgggaggatacctgtcccaac

SEQ ID NO: 100837 - DNA, 36 bp, Artificial Sequence
  primer
gtaaaacgacggccagttcctcaggagtcctcaccg

SEQ ID NO: 100838 - DNA, 38 bp, Artificial Sequence
  primer
gtaaaacgacggccagtgtccttctcccatgtctggag

SEQ ID NO: 100839 - DNA, 20 bp, Artificial Sequence
  primer
cacacagaagctctcggacc

SEQ ID NO: 100840 - DNA, 22 bp, Artificial Sequence
  primer
tggtagataacacaccagccag

SEQ ID NO: 100841 - DNA, 38 bp, Artificial Sequence
  primer
gtaaaacgacggccagttcccaaagaccagacaatgac

SEQ ID NO: 100842 - DNA, 39 bp, Artificial Sequence
  primer
gtaaaacgacggccagttcacactaaaggaggcagaagc

SEQ ID NO: 100843 - DNA, 21 bp, Artificial Sequence
  primer
ccagggagaacacagttgaag

SEQ ID NO: 100844 - DNA, 39 bp, Artificial Sequence
  primer
gtaaaacgacggccagtcgcttatcaattcttaggcagc

SEQ ID NO: 100845 - DNA, 21 bp, Artificial Sequence
  primer
agcccagagccactacaacac

SEQ ID NO: 100846 - DNA, 21 bp, Artificial Sequence
  primer
cctagagcaggctctcttccc

SEQ ID NO: 100847 - DNA, 21 bp, Artificial Sequence
  primer
aggctactgcccatcaatctc

SEQ ID NO: 100848 - DNA, 21 bp, Artificial Sequence
  primer
cacaagagaatgagtggctgc

SEQ ID NO: 100849 - DNA, 38 bp, Artificial Sequence
  primer
gtaaaacgacggccagtggaataggctgtgggtagcag

SEQ ID NO: 100850 - DNA, 38 bp, Artificial Sequence
  primer
gtaaaacgacggccagtctgatttagccaagcagcctc

SEQ ID NO: 100851 - DNA, 21 bp, Artificial Sequence
  primer
caactcctgtcctttccatcc

SEQ ID NO: 100852 - DNA, 18 bp, Artificial Sequence
  primer
gccaagatcgtgccattg

SEQ ID NO: 100853 - DNA, 28 bp, Artificial Sequence
  primer
ttcaacaggattgagtatagaaagacct

SEQ ID NO: 100854 - DNA, 24 bp, Artificial Sequence
  primer
acttaggaagggagaaggctattt

SEQ ID NO: 100855 - DNA, 23 bp, Artificial Sequence
  primer
tctggagccaaacctcataatag

SEQ ID NO: 100856 - DNA, 21 bp, Artificial Sequence
  primer
tcagcttacatcgtgctttga

SEQ ID NO: 100857 - DNA, 40 bp, Artificial Sequence
  primer
gtaaaacgacggccagtgaggcattgacaaggaattctac

SEQ ID NO: 100858 - DNA, 21 bp, Artificial Sequence
  primer
aatggagacattgtggtgcag

SEQ ID NO: 100859 - DNA, 21 bp, Artificial Sequence
  primer
aacatgttaaacgtgcctgct

SEQ ID NO: 100860 - DNA, 37 bp, Artificial Sequence
  primer
gtaaaacgacggccagttggactcccaagtcaaccac

SEQ ID NO: 100861 - DNA, 38 bp, Artificial Sequence
  primer
gtaaaacgacggccagtataacaatctgagaggcgctg

SEQ ID NO: 100862 - DNA, 39 bp, Artificial Sequence
  primer
gtaaaacgacggccagtgttgaacctcatggtggtatga

SEQ ID NO: 100863 - DNA, 21 bp, Artificial Sequence
  primer
tccaacagcctgatcataagc

SEQ ID NO: 100864 - DNA, 40 bp, Artificial Sequence
  primer
gtaaaacgacggccagttttgaactatgaccaaacccttg

SEQ ID NO: 100865 - DNA, 37 bp, Artificial Sequence; identical to SEQ ID NO: 20043
  primer

SEQ ID NO: 100866 - DNA, 43 bp, Artificial Sequence
  primer
gtaaaacgacggccagttgttaggtgtcttcaggaaattattc

SEQ ID NO: 100867 - DNA, 38 bp, Artificial Sequence
  primer
gtaaaacgacggccagttttggccactttcagattcac

SEQ ID NO: 100868 - DNA, 23 bp, Artificial Sequence
  primer
ccatttgagtacatgatgaggga

SEQ ID NO: 100869 - DNA, 21 bp, Artificial Sequence
  primer
ccactgtgactaacggagagg

SEQ ID NO: 100870 - DNA, 38 bp, Artificial Sequence
  primer
gtaaaacgacggccagttttattgctgctctattgccg

SEQ ID NO: 100871 - DNA, 23 bp, Artificial Sequence
  primer
aaagaaaccatgcagtatccaac

SEQ ID NO: 100872 - DNA, 39 bp, Artificial Sequence
  primer
gtaaaacgacggccagtaaggtaacccacattcagcaag

SEQ ID NO: 100873 - DNA, 37 bp, Artificial Sequence
  primer
gtaaaacgacggccagttcccatctacacaggcgaag

SEQ ID NO: 100874 - DNA, 22 bp, Artificial Sequence
  primer
aatagccacgatcctgaacaag

SEQ ID NO: 100875 - DNA, 38 bp, Artificial Sequence
  primer
gtaaaacgacggccagttgttctgcagctcttagcacc

SEQ ID NO: 100876 - DNA, 20 bp, Artificial Sequence
  primer
gtggagacagcaccatcagc

SEQ ID NO: 100877 - DNA, 38 bp, Artificial Sequence
  primer
gtaaaacgacggccagttgaacgcaaatacggtttcac

SEQ ID NO: 100878 - DNA, 24 bp, Artificial Sequence
  primer
gcaagcacctactgtttacaatcc

SEQ ID NO: 100879 - DNA, 43 bp, Artificial Sequence
  primer
gtaaaacgacggccagtaacttaaattgccttaaagtcagctc

SEQ ID NO: 100880 - DNA, 23 bp, Artificial Sequence
  primer
ttccaatcagtgtcatttgtcag

SEQ ID NO: 100881 - DNA, 19 bp, Artificial Sequence
  primer
agcaggtaatgcgtgaggg

SEQ ID NO: 100882 - DNA, 22 bp, Artificial Sequence
  primer
aaggttacaagaacacgttgcc

SEQ ID NO: 100883 - DNA, 38 bp, Artificial Sequence
  primer
gtaaaacgacggccagtactattgaggagcacttcgcc

SEQ ID NO: 100884 - DNA, 21 bp, Artificial Sequence
  primer
cctggccctataaccaacttc

SEQ ID NO: 100885 - DNA, 21 bp, Artificial Sequence
  primer
ctcacacagacatctgcaggc

SEQ ID NO: 100886 - DNA, 38 bp, Artificial Sequence
  primer
gtaaaacgacggccagtatggcagcctcctgtatcttg

SEQ ID NO: 100887 - DNA, 21 bp, Artificial Sequence
  primer
gctctcctcctggaatcaatc

SEQ ID NO: 100888 - DNA, 20 bp, Artificial Sequence
  primer
gtgaagaagtgccgatgcag

SEQ ID NO: 100889 - DNA, 20 bp, Artificial Sequence
  primer
ttaggaggcaggtagggagc

SEQ ID NO: 100890 - DNA, 21 bp, Artificial Sequence
  primer
cctaacagcaacattgccaac

SEQ ID NO: 100891 - DNA, 23 bp, Artificial Sequence
  primer
cacaaacccaaacaaacattctc

SEQ ID NO: 100892 - DNA, 38 bp, Artificial Sequence
  primer
gtaaaacgacggccagtcaaagccactgtgctcaagtc

SEQ ID NO: 100893 - DNA, 38 bp, Artificial Sequence
  primer
gtaaaacgacggccagttcaccaacaggtgaacactgg

SEQ ID NO: 100894 - DNA, 20 bp, Artificial Sequence
  primer
gtcttaaggcgggcaggtag

SEQ ID NO: 100895 - DNA, 38 bp, Artificial Sequence
  primer
gtaaaacgacggccagtgagacagatccagcttcctgc

SEQ ID NO: 100896 - DNA, 39 bp, Artificial Sequence
  primer
gtaaaacgacggccagttgaaatgtcaggtgttacaggc

SEQ ID NO: 100897 - DNA, 21 bp, Artificial Sequence
  primer
atggacctggtttccaaactg

SEQ ID NO: 100898 - DNA, 36 bp, Artificial Sequence
  primer
gtaaaacgacggccagtaggtgcacagaaagccctg

SEQ ID NO: 100899 - DNA, 36 bp, Artificial Sequence
  primer
gtaaaacgacggccagtactgccctcagccaagatg

SEQ ID NO: 100900 - DNA, 21 bp, Artificial Sequence
  primer
aagaagattggcatgtctggg

SEQ ID NO: 100901 - DNA, 38 bp, Artificial Sequence
  primer
gtaaaacgacggccagtgacacccttggagaggacaag

SEQ ID NO: 100902 - DNA, 39 bp, Artificial Sequence
  primer
gtaaaacgacggccagttcttcaacttcttgcttcagcc

SEQ ID NO: 100903 - DNA, 36 bp, Artificial Sequence
  primer
gtaaaacgacggccagtaaacagctcgggactgctg

SEQ ID NO: 100904 - DNA, 20 bp, Artificial Sequence
  primer
gagcagaacgcaaaggacac

SEQ ID NO: 100905 - DNA, 37 bp, Artificial Sequence
  primer
gtaaaacgacggccagtgatgaccgtgcctctctgtg

SEQ ID NO: 100906 - DNA, 20 bp, Artificial Sequence
  primer
cacctggacaaggaggtcag

SEQ ID NO: 100907 - DNA, 21 bp, Artificial Sequence
  primer
gctggtactcattccactccc

SEQ ID NO: 100908 - DNA, 21 bp, Artificial Sequence
  primer
tgaatcttcaagtcagctggg

SEQ ID NO: 100909 - DNA, 21 bp, Artificial Sequence
  primer
gcaggcaccttgtgttacttg

SEQ ID NO: 100910 - DNA, 21 bp, Artificial Sequence
  primer
gaacaagagggaagggatgtg

SEQ ID NO: 100911 - DNA, 20 bp, Artificial Sequence
  primer
aatctgggttggcctcaaag

SEQ ID NO: 100912 - DNA, 21 bp, Artificial Sequence
  primer
cgtacacttctccacacccag

SEQ ID NO: 100913 - DNA, 38 bp, Artificial Sequence
  primer
gtaaaacgacggccagtgagctgtgtcatccctctctg

SEQ ID NO: 100914 - DNA, 21 bp, Artificial Sequence
  primer
gcagaattagctaccctgccc

SEQ ID NO: 100915 - DNA, 21 bp, Artificial Sequence
  primer
tccctgcttcttaattgcagc

SEQ ID NO: 100916 - DNA, 38 bp, Artificial Sequence
  primer
gtaaaacgacggccagttgccagacattaccaatggag

SEQ ID NO: 100917 - DNA, 20 bp, Artificial Sequence
  primer
cgtatgaattctgttggcgg

SEQ ID NO: 100918 - DNA, 36 bp, Artificial Sequence
  primer
gtaaaacgacggccagtaaatcgagatgacacccgc

SEQ ID NO: 100919 - DNA, 38 bp, Artificial Sequence
  primer
gtaaaacgacggccagtactccataaaggcagcaccag

SEQ ID NO: 100920 - DNA, 21 bp, Artificial Sequence
  primer
tctgccgtgtgataaatgctc

SEQ ID NO: 100921 - DNA, 19 bp, Artificial Sequence
  primer
tcctggctttgttcttggg

SEQ ID NO: 100922 - DNA, 20 bp, Artificial Sequence
  primer
ttcccatgagcagcagagtc

SEQ ID NO: 100923 - DNA, 20 bp, Artificial Sequence
  primer
ccatcctcgctagaaatggc

SEQ ID NO: 100924 - DNA, 38 bp, Artificial Sequence
  primer
gtaaaacgacggccagtcagctgggtctgtcaaattcc

SEQ ID NO: 100925 - DNA, 38 bp, Artificial Sequence
  primer
gtaaaacgacggccagtttgaaagtcgccctaacaagg

SEQ ID NO: 100926 - DNA, 39 bp, Artificial Sequence
  primer
gtaaaacgacggccagtgcagactccttccacttcagag

SEQ ID NO: 100927 - DNA, 40 bp, Artificial Sequence
  primer
gtaaaacgacggccagttccacacattagctcattcaacc

SEQ ID NO: 100928 - DNA, 22 bp, Artificial Sequence
  primer
gcttgttctgtcttgtatgggc

SEQ ID NO: 100929 - DNA, 19 bp, Artificial Sequence
  primer
tcagacatgagccaccacg

SEQ ID NO: 100930 - DNA, 21 bp, Artificial Sequence
  primer
gcaatcctcagactgaccagg

SEQ ID NO: 100931 - DNA, 26 bp, Artificial Sequence
  primer
caatggtacccaatatagaagttgtg

SEQ ID NO: 100932 - DNA, 21 bp, Artificial Sequence
  primer
gagcaagagctgcttctaggg

SEQ ID NO: 100933 - DNA, 21 bp, Artificial Sequence
  primer
gagcaacgaagagtccagagc

SEQ ID NO: 100934 - DNA, 38 bp, Artificial Sequence
  primer
gtaaaacgacggccagttcagtgatcatgagtccagcc

SEQ ID NO: 100935 - DNA, 22 bp, Artificial Sequence
  primer
gcttgttctgtcttgtatgggc

SEQ ID NO: 100936 - DNA, 21 bp, Artificial Sequence
  primer
caggatgacctggtttaagcg

SEQ ID NO: 100937 - DNA, 38 bp, Artificial Sequence
  primer
gtaaaacgacggccagttggagtcttgcagaagcctat

SEQ ID NO: 100938 - DNA, 20 bp, Artificial Sequence
  primer
cagatcaggcatctccgttc

SEQ ID NO: 100939 - DNA, 38 bp, Artificial Sequence
  primer
gtaaaacgacggccagtaaacagctggaagaagttggg

SEQ ID NO: 100940 - DNA, 39 bp, Artificial Sequence
  primer
gtaaaacgacggccagtgaagagggatggtgtttagcag

SEQ ID NO: 100941 - DNA, 19 bp, Artificial Sequence
  primer
aagtgcacgctcaccattg

SEQ ID NO: 100942 - DNA, 21 bp, Artificial Sequence
  primer
agtcagcctgaaggcaatcac

SEQ ID NO: 100943 - DNA, 22 bp, Artificial Sequence
  primer
tcctatcaggatttcctgggtt

SEQ ID NO: 100944 - DNA, 39 bp, Artificial Sequence
  primer
gtaaaacgacggccagtttcctgcaactgtgtttattgc

SEQ ID NO: 100945 - DNA, 36 bp, Artificial Sequence
  primer
gtaaaacgacggccagtgaccttggacgaggtcgag

SEQ ID NO: 100946 - DNA, 38 bp, Artificial Sequence
  primer
gtaaaacgacggccagttagcgggcaatgtcactattc

SEQ ID NO: 100947 - DNA, 37 bp, Artificial Sequence
  primer
gtaaaacgacggccagtacccagatcccttcttcctg

SEQ ID NO: 100948 - DNA, 38 bp, Artificial Sequence
  primer
gtaaaacgacggccagttggtgctcaacatttcctttg

SEQ ID NO: 100949 - DNA, 21 bp, Artificial Sequence
  primer
agtgctctagaagcagggcag

SEQ ID NO: 100950 - DNA, 22 bp, Artificial Sequence
  primer
tgacaatgtgtctggcaagttc

SEQ ID NO: 100951 - DNA, 22 bp, Artificial Sequence
  primer
tcactggtgaatgttgtgttcc

SEQ ID NO: 100952 - DNA, 21 bp, Artificial Sequence
  primer
gtcccaatctggcatcctaac

SEQ ID NO: 100953 - DNA, 21 bp, Artificial Sequence
  primer
tgtagagaatggcagtgggtg

SEQ ID NO: 100954 - DNA, 38 bp, Artificial Sequence
  primer
gtaaaacgacggccagtgtgcaggtgtattcctggatg

SEQ ID NO: 100955 - DNA, 21 bp, Artificial Sequence
  primer
agggagggacagggtgagtag

SEQ ID NO: 100956 - DNA, 21 bp, Artificial Sequence
  primer
tgactgacaaccttctgaccc

SEQ ID NO: 100957 - DNA, 38 bp, Artificial Sequence
  primer
gtaaaacgacggccagtttctggaggcttagggttgtg

SEQ ID NO: 100958 - DNA, 37 bp, Artificial Sequence
  primer
gtaaaacgacggccagtacatccctggcatgagagat

SEQ ID NO: 100959 - DNA, 27 bp, Artificial Sequence
  primer
tgaatatttcctacaatgtcaacctct

SEQ ID NO: 100960 - DNA, 23 bp, Artificial Sequence
  primer
tggctcgataacagatttacagc

SEQ ID NO: 100961 - DNA, 39 bp, Artificial Sequence
  primer
gtaaaacgacggccagttcagatagcaaatgttgttggc

SEQ ID NO: 100962 - DNA, 43 bp, Artificial Sequence
  primer
gtaaaacgacggccagttcactttattgaagccatgtaaacac

SEQ ID NO: 100963 - DNA, 21 bp, Artificial Sequence
  primer
ctaggcgtatgaaggccaaat

SEQ ID NO: 100964 - DNA, 38 bp, Artificial Sequence
  primer
gtaaaacgacggccagtatacccatttggaggatgtgc

SEQ ID NO: 100965 - DNA, 25 bp, Artificial Sequence
  primer
caaaccaaatcacactctctgtaac

SEQ ID NO: 100966 - DNA, 21 bp, Artificial Sequence
  primer
accctctgagaagtgggtctg

SEQ ID NO: 100967 - DNA, 20 bp, Artificial Sequence
  primer
ctggtttgggcttcagactc

SEQ ID NO: 100968 - DNA, 38 bp, Artificial Sequence
  primer
gtaaaacgacggccagtcctcttgatagctgctggctc

SEQ ID NO: 100969 - DNA, 21 bp, Artificial Sequence
  primer
agggcgagaatgctatttcag

SEQ ID NO: 100970 - DNA, 20 bp, Artificial Sequence
  primer
ctctcccaactcccacacac

SEQ ID NO: 100971 - DNA, 21 bp, Artificial Sequence
  primer
gggctctgaaatatgcaaagg

SEQ ID NO: 100972 - DNA, 21 bp, Artificial Sequence
  primer
agacgtgggtgtagccctaag

SEQ ID NO: 100973 - DNA, 21 bp, Artificial Sequence
  primer
gttgccgtaatggaggacaag

SEQ ID NO: 100974 - DNA, 22 bp, Artificial Sequence
  primer
ccagtgtgtccgagttcctatc

SEQ ID NO: 100975 - DNA, 38 bp, Artificial Sequence
  primer
gtaaaacgacggccagttcagttcttggtgactttgcc

SEQ ID NO: 100976 - DNA, 21 bp, Artificial Sequence
  primer
agctcgaaccaacaaacacag

SEQ ID NO: 100977 - DNA, 38 bp, Artificial Sequence
  primer
gtaaaacgacggccagtaagcagctcctacaatgtccc

SEQ ID NO: 100978 - DNA, 20 bp, Artificial Sequence
  primer
gaactgagtgggaggtgtgg

SEQ ID NO: 100979 - DNA, 21 bp, Artificial Sequence
  primer
aacactgacatcacaggctgg

SEQ ID NO: 100980 - DNA, 38 bp, Artificial Sequence
  primer
gtaaaacgacggccagtcaccaccttcatgatcagcac

SEQ ID NO: 100981 - DNA, 38 bp, Artificial Sequence
  primer
gtaaaacgacggccagtgctcccagcagatgctctatc

SEQ ID NO: 100982 - DNA, 21 bp, Artificial Sequence
  primer
gattgaggtccactcaggtcc

SEQ ID NO: 100983 - DNA, 21 bp, Artificial Sequence
  primer
tgtaacccagctacctcctgg

SEQ ID NO: 100984 - DNA, 20 bp, Artificial Sequence
  primer
ggaaaggaagatggtacggg

SEQ ID NO: 100985 - DNA, 21 bp, Artificial Sequence
  primer
atggtgcaaagtcagtgcttg

SEQ ID NO: 100986 - DNA, 20 bp, Artificial Sequence
  primer
gagaacgagctctgtgcagg

SEQ ID NO: 100987 - DNA, 21 bp, Artificial Sequence
  primer
ccatctatctcacagccaggg

SEQ ID NO: 100988 - DNA, 21 bp, Artificial Sequence
  primer
tggatgagaaggaagttgctg

SEQ ID NO: 100989 - DNA, 38 bp, Artificial Sequence
  primer
gtaaaacgacggccagttgtgatgatgaggactgggac

SEQ ID NO: 100990 - DNA, 38 bp, Artificial Sequence
  primer
gtaaaacgacggccagtaaacccaggctgaagacagag

SEQ ID NO: 100991 - DNA, 21 bp, Artificial Sequence
  primer
agacatatccttgggtgtccc

SEQ ID NO: 100992 - DNA, 38 bp, Artificial Sequence
  primer
gtaaaacgacggccagtgttgtgctgcacgagactgac

SEQ ID NO: 100993 - DNA, 38 bp, Artificial Sequence
  primer
gtaaaacgacggccagtcggcagtaggtctcattgttg

SEQ ID NO: 100994 - DNA, 38 bp, Artificial Sequence
  primer
gtaaaacgacggccagtatggagaagatgtccagcagc

SEQ ID NO: 100995 - DNA, 21 bp, Artificial Sequence
  primer
acaagtaaacccgtcccagag

SEQ ID NO: 100996 - DNA, 38 bp, Artificial Sequence
  primer
gtaaaacgacggccagtcaagacccgaagctactttgc

SEQ ID NO: 100997 - DNA, 39 bp, Artificial Sequence
  primer
gtaaaacgacggccagtgagagatgaaacagctgcaacc

SEQ ID NO: 100998 - DNA, 38 bp, Artificial Sequence
  primer
gtaaaacgacggccagtgtcattgcagtcagaggttgg

SEQ ID NO: 100999 - DNA, 36 bp, Artificial Sequence
  primer
gtaaaacgacggccagtgaactttagcgacgcggtg

SEQ ID NO: 101000 - DNA, 21 bp, Artificial Sequence
  primer
aaagaggtgagatgggcagac

SEQ ID NO: 101001 - DNA, 21 bp, Artificial Sequence
  primer
tgatggctggatcaaggtagg

SEQ ID NO: 101002 - DNA, 38 bp, Artificial Sequence
  primer
gtaaaacgacggccagtggtttgtccctatggctgaag

SEQ ID NO: 101003 - DNA, 38 bp, Artificial Sequence
  primer
gtaaaacgacggccagtcacaggaacacaggtccagag

SEQ ID NO: 101004 - DNA, 20 bp, Artificial Sequence
  primer
gcctctcgtgttctccaatg

SEQ ID NO: 101005 - DNA, 38 bp, Artificial Sequence
  primer
gtaaaacgacggccagtctcgtccagtggctttgtctc

SEQ ID NO: 101006 - DNA, 38 bp, Artificial Sequence
  primer
gtaaaacgacggccagtccgtttggaagagcttcactg

SEQ ID NO: 101007 - DNA, 35 bp, Artificial Sequence
  primer
gtaaaacgacggccagtctggttgatggcgtccag

SEQ ID NO: 101008 - DNA, 21 bp, Artificial Sequence
  primer
gaccaggtgggataaggtctg

SEQ ID NO: 101009 - DNA, 38 bp, Artificial Sequence
  primer
gtaaaacgacggccagtagtgctgaggagctgtcactg

SEQ ID NO: 101010 - DNA, 38 bp, Artificial Sequence
  primer
gtaaaacgacggccagtgctgtgtctcaaacatccacc

SEQ ID NO: 101011 - DNA, 38 bp, Artificial Sequence
  primer
gtaaaacgacggccagtattgggcaagtctcgaacaac

SEQ ID NO: 101012 - DNA, 21 bp, Artificial Sequence
  primer
cctgttcttccttcttgcctg

SEQ ID NO: 101013 - DNA, 38 bp, Artificial Sequence
  primer
gtaaaacgacggccagtgccaagtgaacttgtggacag

SEQ ID NO: 101014 - DNA, 21 bp, Artificial Sequence
  primer
ctgacaccagctcctcctttc

SEQ ID NO: 101015 - DNA, 38 bp, Artificial Sequence
  primer
gtaaaacgacggccagtctctgtctcctgcatcaccag

SEQ ID NO: 101016 - DNA, 35 bp, Artificial Sequence
  primer
gtaaaacgacggccagttcagttgggtgcaggctc

SEQ ID NO: 101017 - DNA, 21 bp, Artificial Sequence
  primer
gactttcccaagactgccatc

SEQ ID NO: 101018 - DNA, 21 bp, Artificial Sequence
  primer
ttccctactgacctttctggg

SEQ ID NO: 101019 - DNA, 37 bp, Artificial Sequence
  primer
gtaaaacgacggccagttggcccagtactctgacctg

SEQ ID NO: 101020 - DNA, 21 bp, Artificial Sequence
  primer
ggtctttgtctgtgaccctcc

SEQ ID NO: 101021 - DNA, 38 bp, Artificial Sequence
  primer
gtaaaacgacggccagtgtgctgaggccatgttgtaag

SEQ ID NO: 101022 - DNA, 21 bp, Artificial Sequence
  primer
tttctttgcagactgtcaggg

SEQ ID NO: 101023 - DNA, 21 bp, Artificial Sequence
  primer
cacagcctcttcaatgtccag

SEQ ID NO: 101024 - DNA, 37 bp, Artificial Sequence
  primer
gtaaaacgacggccagtgcgctactgctgactgtgac

SEQ ID NO: 101025 - DNA, 21 bp, Artificial Sequence
  primer
cttgacttgactctgggcctc

SEQ ID NO: 101026 - DNA, 20 bp, Artificial Sequence
  primer
tctagaggcttccttgtggc

SEQ ID NO: 101027 - DNA, 21 bp, Artificial Sequence
  primer
tgtggtggaagacatgaggac

SEQ ID NO: 101028 - DNA, 38 bp, Artificial Sequence
  primer
gtaaaacgacggccagtaggcaggtacccacttcagtc

SEQ ID NO: 101029 - DNA, 22 bp, Artificial Sequence
  primer
caagtgcattgtttcaaacctc

SEQ ID NO: 101030 - DNA, 44 bp, Artificial Sequence
  primer
gtaaaacgacggccagtccctgtccagtagtattcttacatttc

SEQ ID NO: 101031 - DNA, 23 bp, Artificial Sequence
  primer
gaaaggagatttctacattggca

SEQ ID NO: 101032 - DNA, 40 bp, Artificial Sequence
  primer
gtaaaacgacggccagtttccaacttgaaagtggagaaag

SEQ ID NO: 101033 - DNA, 38 bp, Artificial Sequence
  primer
gtaaaacgacggccagttgctttggaagtcatccattc

SEQ ID NO: 101034 - DNA, 24 bp, Artificial Sequence
  primer
tgcaggtcaatattctccttacag

SEQ ID NO: 101035 - DNA, 21 bp, Artificial Sequence
  primer
taggaggactgggcagttcag

SEQ ID NO: 101036 - DNA, 21 bp, Artificial Sequence
  primer
tcatcaggagagccattgttg

SEQ ID NO: 101037 - DNA, 20 bp, Artificial Sequence
  primer
gtttcaaacatccaccgagc

SEQ ID NO: 101038 - DNA, 38 bp, Artificial Sequence
  primer
gtaaaacgacggccagtttgttaattgtgtccaacggc

SEQ ID NO: 101039 - DNA, 38 bp, Artificial Sequence
  primer
gtaaaacgacggccagtaatggctgggtttcaaacatc

SEQ ID NO: 101040 - DNA, 40 bp, Artificial Sequence
  primer
gtaaaacgacggccagtaatgcttcaattggaagtgtttc

SEQ ID NO: 101041 - DNA, 40 bp, Artificial Sequence
  primer
gtaaaacgacggccagtttcttcaagtttcactgttcgtg

SEQ ID NO: 101042 - DNA, 39 bp, Artificial Sequence
  primer
gtaaaacgacggccagttcttgaatggcatacagtggtg

SEQ ID NO: 101043 - DNA, 21 bp, Artificial Sequence
  primer
tttcaaacaaccatttggcag

SEQ ID NO: 101044 - DNA, 38 bp, Artificial Sequence
  primer
gtaaaacgacggccagtgtggctgagtttcaaagagcc

SEQ ID NO: 101045 - DNA, 24 bp, Artificial Sequence
  primer
ttaacacattcatcaccttcttgg

SEQ ID NO: 101046 - DNA, 21 bp, Artificial Sequence
  primer
tcatgataggacccttctcgg

SEQ ID NO: 101047 - DNA, 42 bp, Artificial Sequence
  primer
gtaaaacgacggccagttctgacagaactaacatctcccttc

SEQ ID NO: 101048 - DNA, 21 bp, Artificial Sequence
  primer
aagccacacagcctgcttaac

SEQ ID NO: 101049 - DNA, 22 bp, Artificial Sequence
  primer
agtggtgttgtttcaaagagcc

SEQ ID NO: 101050 - DNA, 22 bp, Artificial Sequence
  primer
aggagatgcttggttcattagc

SEQ ID NO: 101051 - DNA, 38 bp, Artificial Sequence
  primer
gtaaaacgacggccagtccaaatgtactctgaggctcg

SEQ ID NO: 101052 - DNA, 38 bp, Artificial Sequence
  primer
gtaaaacgacggccagtagcctggctgagggaatttag

SEQ ID NO: 101053 - DNA, 21 bp, Artificial Sequence
  primer
ggatggcatcaggctgtttag

SEQ ID NO: 101054 - DNA, 38 bp, Artificial Sequence
  primer
gtaaaacgacggccagttgccatcacagctttagcatc

SEQ ID NO: 101055 - DNA, 21 bp, Artificial Sequence
  primer
ctggctttggctgaagaagac

SEQ ID NO: 101056 - DNA, 26 bp, Artificial Sequence
  primer
cgatctatgacaatctttacagtgcc

SEQ ID NO: 101057 - DNA, 40 bp, Artificial Sequence
  primer
gtaaaacgacggccagttgtagtatcagtccagacacccg

SEQ ID NO: 101058 - DNA, 25 bp, Artificial Sequence
  primer
cacagttgaagttaattgtctgctc

SEQ ID NO: 101059 - DNA, 21 bp, Artificial Sequence
  primer
gggcttggagctttgtgtatc

SEQ ID NO: 101060 - DNA, 40 bp, Artificial Sequence
  primer
gtaaaacgacggccagtctgttacattggatgtgtcttgc

SEQ ID NO: 101061 - DNA, 38 bp, Artificial Sequence
  primer
gtaaaacgacggccagttggacagtgagggaagaaacc

SEQ ID NO: 101062 - DNA, 38 bp, Artificial Sequence
  primer
gtaaaacgacggccagtttgagatggagttggaggagg

SEQ ID NO: 101063 - DNA, 37 bp, Artificial Sequence
  primer
gtaaaacgacggccagtgcttgggaagtttgggtttg

SEQ ID NO: 101064 - DNA, 39 bp, Artificial Sequence
  primer
gtaaaacgacggccagtttcctggaactgtgtgtgagag

SEQ ID NO: 101065 - DNA, 21 bp, Artificial Sequence
  primer
gcattactttgagagcctggg

SEQ ID NO: 101066 - DNA, 38 bp, Artificial Sequence
  primer
gtaaaacgacggccagttgtctttcagccagagattgc

SEQ ID NO: 101067 - DNA, 37 bp, Artificial Sequence
  primer
gtaaaacgacggccagtccaatcattgatggtccctg

SEQ ID NO: 101068 - DNA, 39 bp, Artificial Sequence
  primer
gtaaaacgacggccagtttcagctttactttcagcggtc

SEQ ID NO: 101069 - DNA, 21 bp, Artificial Sequence
  primer
gctgggattctttcacagagg

SEQ ID NO: 101070 - DNA, 21 bp, Artificial Sequence
  primer
tctccatggcaatgtgaactg

SEQ ID NO: 101071 - DNA, 38 bp, Artificial Sequence
  primer
gtaaaacgacggccagttgatgagctgctacttggtgc

SEQ ID NO: 101072 - DNA, 38 bp, Artificial Sequence
  primer
gtaaaacgacggccagtttctctacaattggaaccggg

SEQ ID NO: 101073 - DNA, 39 bp, Artificial Sequence
  primer
gtaaaacgacggccagtcttctccactttcctgatttcc

SEQ ID NO: 101074 - DNA, 41 bp, Artificial Sequence
  primer
gtaaaacgacggccagtcaccatgtgatcagtggaatttag

SEQ ID NO: 101075 - DNA, 21 bp, Artificial Sequence
  primer
actttgcttcagaaactgggc

SEQ ID NO: 101076 - DNA, 38 bp, Artificial Sequence
  primer
gtaaaacgacggccagtacatcctcataggttggtggg

SEQ ID NO: 101077 - DNA, 38 bp, Artificial Sequence
  primer
gtaaaacgacggccagtcagattcctcttggaaggtgg

SEQ ID NO: 101078 - DNA, 38 bp, Artificial Sequence
  primer
gtaaaacgacggccagtattgtttggttgtttccacgc

SEQ ID NO: 101079 - DNA, 21 bp, Artificial Sequence
  primer
agggcaatttctatcagggtg

SEQ ID NO: 101080 - DNA, 38 bp, Artificial Sequence
  primer
gtaaaacgacggccagttccagcttgttctctcccttc

SEQ ID NO: 101081 - DNA, 21 bp, Artificial Sequence
  primer
ctgatgacccacctccctaac

SEQ ID NO: 101082 - DNA, 38 bp, Artificial Sequence
  primer
gtaaaacgacggccagtaaagacaggatccaaccttgc

SEQ ID NO: 101083 - DNA, 21 bp, Artificial Sequence
  primer
aagagactggagcaccctttg

SEQ ID NO: 101084 - DNA, 39 bp, Artificial Sequence
  primer
gtaaaacgacggccagtggaattcccagtctgaggtagc

SEQ ID NO: 101085 - DNA, 38 bp, Artificial Sequence
  primer
gtaaaacgacggccagtgaattcagagccttgacctgc

SEQ ID NO: 101086 - DNA, 39 bp, Artificial Sequence
  primer
gtaaaacgacggccagtcactcccaaatttctgttctgg

SEQ ID NO: 101087 - DNA, 21 bp, Artificial Sequence
  primer
gacagcagcctcaactcattc

SEQ ID NO: 101088 - DNA, 21 bp, Artificial Sequence
  primer
aagagggtgaagcgatttcag

SEQ ID NO: 101089 - DNA, 38 bp, Artificial Sequence
  primer
gtaaaacgacggccagttagagccaggaggaagactgg

SEQ ID NO: 101090 - DNA, 20 bp, Artificial Sequence
  primer
aaacacacaccgtgccactc

SEQ ID NO: 101091 - DNA, 21 bp, Artificial Sequence
  primer
caccatttctatctccctgcc

SEQ ID NO: 101092 - DNA, 38 bp, Artificial Sequence
  primer
gtaaaacgacggccagtgataactggtggccgtattcc

SEQ ID NO: 101093 - DNA, 21 bp, Artificial Sequence
  primer
gtttgtcagaggcagaaccag

SEQ ID NO: 101094 - DNA, 21 bp, Artificial Sequence
  primer
gtgctaactcaaatcccaccc

SEQ ID NO: 101095 - DNA, 22 bp, Artificial Sequence
  primer
tcataagagctcccgatctcac

SEQ ID NO: 101096 - DNA, 21 bp, Artificial Sequence
  primer
atcatccagtgtggtctgtgg

SEQ ID NO: 101097 - DNA, 39 bp, Artificial Sequence
  primer
gtaaaacgacggccagtgactcttcaggagaacccaacc

SEQ ID NO: 101098 - DNA, 21 bp, Artificial Sequence
  primer
tttaaacgacagtgcacccag

SEQ ID NO: 101099 - DNA, 38 bp, Artificial Sequence
  primer
gtaaaacgacggccagttcggaggtgtatttgaagtgg

SEQ ID NO: 101100 - DNA, 38 bp, Artificial Sequence
  primer
gtaaaacgacggccagtataaccctttggcaatgttcc

SEQ ID NO: 101101 - DNA, 39 bp, Artificial Sequence
  primer
gtaaaacgacggccagtctttatcctctatgctttgggc

SEQ ID NO: 101102 - DNA, 21 bp, Artificial Sequence
  primer
agggactctgatcctttggag

SEQ ID NO: 101103 - DNA, 21 bp, Artificial Sequence
  primer
ttcatcttctggctgttgtgg

SEQ ID NO: 101104 - DNA, 21 bp, Artificial Sequence
  primer
gagaaatggaatggtgagcag

SEQ ID NO: 101105 - DNA, 38 bp, Artificial Sequence
  primer
gtaaaacgacggccagttgggctttctgggtaatcaag

SEQ ID NO: 101106 - DNA, 38 bp, Artificial Sequence
  primer
gtaaaacgacggccagtaactggctcaccttcttgctc

SEQ ID NO: 101107 - DNA, 21 bp, Artificial Sequence
  primer
tgaggcctcgtctcctgatag

SEQ ID NO: 101108 - DNA, 38 bp, Artificial Sequence
  primer
gtaaaacgacggccagtgtggtgactggcattcagaag

SEQ ID NO: 101109 - DNA, 39 bp, Artificial Sequence
  primer
gtaaaacgacggccagtttgagattcctgtgttgcattg

SEQ ID NO: 101110 - DNA, 38 bp, Artificial Sequence
  primer
gtaaaacgacggccagtagtcatctcggttgtgtgtgg

SEQ ID NO: 101111 - DNA, 38 bp, Artificial Sequence
  primer
gtaaaacgacggccagttaaattcatgggtgaggatgc

SEQ ID NO: 101112 - DNA, 38 bp, Artificial Sequence
  primer
gtaaaacgacggccagtagggagggattgaaacttgtg

SEQ ID NO: 101113 - DNA, 21 bp, Artificial Sequence
  primer
gatttatctgttgaaggcggc

SEQ ID NO: 101114 - DNA, 38 bp, Artificial Sequence
  primer
gtaaaacgacggccagtcaaagccatctgttcatctgc

SEQ ID NO: 101115 - DNA, 38 bp, Artificial Sequence
  primer
gtaaaacgacggccagtactaatttgggcttgacaccc

SEQ ID NO: 101116 - DNA, 21 bp, Artificial Sequence
  primer
ctgctgataaagcctcaggtc

SEQ ID NO: 101117 - DNA, 38 bp, Artificial Sequence
  primer
gtaaaacgacggccagtgaagcacctttaattgccacc

SEQ ID NO: 101118 - DNA, 38 bp, Artificial Sequence
  primer
gtaaaacgacggccagtccataggctgagtggaagctc

SEQ ID NO: 101119 - DNA, 38 bp, Artificial Sequence
  primer
gtaaaacgacggccagttagaagatacctccactgccg

SEQ ID NO: 101120 - DNA, 38 bp, Artificial Sequence
  primer
gtaaaacgacggccagtctgaaattgcaggcatcgtag

SEQ ID NO: 101121 - DNA, 38 bp, Artificial Sequence
  primer
gtaaaacgacggccagtctggatggctaacctcctctg

SEQ ID NO: 101122 - DNA, 22 bp, Artificial Sequence
  primer
aaggaggtcagaaggagcaatc

SEQ ID NO: 101123 - DNA, 21 bp, Artificial Sequence
  primer
ttactggacacagcagccttg

SEQ ID NO: 101124 - DNA, 39 bp, Artificial Sequence
  primer
gtaaaacgacggccagtttggttcttcagccagctttac

SEQ ID NO: 101125 - DNA, 39 bp, Artificial Sequence
  primer
gtaaaacgacggccagttctgacttcacctgttccactg

SEQ ID NO: 101126 - DNA, 21 bp, Artificial Sequence
  primer
tggacatccacgatttgaaag

SEQ ID NO: 101127 - DNA, 36 bp, Artificial Sequence
  primer
gtaaaacgacggccagtcctctgggttcatcagcag

SEQ ID NO: 101128 - DNA, 38 bp, Artificial Sequence
  primer
gtaaaacgacggccagtatttcctctgaatcgcctgag

SEQ ID NO: 101129 - DNA, 37 bp, Artificial Sequence
  primer
gtaaaacgacggccagtgattgctggcttctggactc

SEQ ID NO: 101130 - DNA, 21 bp, Artificial Sequence
  primer
acttgcaaagttggaggaagc

SEQ ID NO: 101131 - DNA, 38 bp, Artificial Sequence
  primer
gtaaaacgacggccagtcctgctgcttctttccttctg

SEQ ID NO: 101132 - DNA, 21 bp, Artificial Sequence
  primer
taaaggatgtggttgggttcc

SEQ ID NO: 101133 - DNA, 38 bp, Artificial Sequence
  primer
gtaaaacgacggccagttatctactgaaccgcctttcg

SEQ ID NO: 101134 - DNA, 21 bp, Artificial Sequence
  primer
agaaccactggcaggaaagtc

SEQ ID NO: 101135 - DNA, 25 bp, Artificial Sequence
  primer
tccatagctctgactctttgaactg

SEQ ID NO: 101136 - DNA, 38 bp, Artificial Sequence
  primer
gtaaaacgacggccagtctttacacgggtatcttccgc

SEQ ID NO: 101137 - DNA, 21 bp, Artificial Sequence
  primer
cggctggcttactagtcactg

SEQ ID NO: 101138 - DNA, 40 bp, Artificial Sequence
  primer
gtaaaacgacggccagtgtttcactatcatcagggagtgg

SEQ ID NO: 101139 - DNA, 21 bp, Artificial Sequence
  primer
ctcttcactgggaattgtggg

SEQ ID NO: 101140 - DNA, 38 bp, Artificial Sequence
  primer
gtaaaacgacggccagtcggtgactttgagtccacatc

SEQ ID NO: 101141 - DNA, 35 bp, Artificial Sequence
  primer
gtaaaacgacggccagtctgctgggaaatgatgcc

SEQ ID NO: 101142 - DNA, 38 bp, Artificial Sequence
  primer
gtaaaacgacggccagtgctacgttaccaacggtctcc

SEQ ID NO: 101143 - DNA, 21 bp, Artificial Sequence
  primer
ctccagaacatgatgggtgtc

SEQ ID NO: 101144 - DNA, 21 bp, Artificial Sequence
  primer
ccagatgcaaattcttcctcc

SEQ ID NO: 101145 - DNA, 21 bp, Artificial Sequence
  primer
tgtcagtggcagaaattggac

SEQ ID NO: 101146 - DNA, 21 bp, Artificial Sequence
  primer
gtgccaaacaccttgtcagtg

SEQ ID NO: 101147 - DNA, 38 bp, Artificial Sequence
  primer
gtaaaacgacggccagttttgctttcagaccattctgc

SEQ ID NO: 101148 - DNA, 21 bp, Artificial Sequence
  primer
tttgaatggaaccgaaccaac

SEQ ID NO: 101149 - DNA, 37 bp, Artificial Sequence
  primer
gtaaaacgacggccagttcaggcatgcccaaataatg

SEQ ID NO: 101150 - DNA, 38 bp, Artificial Sequence
  primer
gtaaaacgacggccagtatgcagtgacaggaaagatgg

SEQ ID NO: 101151 - DNA, 21 bp, Artificial Sequence
  primer
gttcctcccatgctcaatttc

SEQ ID NO: 101152 - DNA, 39 bp, Artificial Sequence
  primer
gtaaaacgacggccagttgctttgtgggaagagtcataa

SEQ ID NO: 101153 - DNA, 21 bp, Artificial Sequence
  primer
aaccagcactttgcacaacac

SEQ ID NO: 101154 - DNA, 38 bp, Artificial Sequence
  primer
gtaaaacgacggccagtttagacggcatttctcccttg

SEQ ID NO: 101155 - DNA, 21 bp, Artificial Sequence
  primer
ccactgacagtaggttgggag

SEQ ID NO: 101156 - DNA, 22 bp, Artificial Sequence
  primer
tcactgcaccatgaatatgctc

SEQ ID NO: 101157 - DNA, 21 bp, Artificial Sequence
  primer
agttgagcatggaagtgggtg

SEQ ID NO: 101158 - DNA, 22 bp, Artificial Sequence
  primer
agcacctaaaggaatgaacagc

SEQ ID NO: 101159 - DNA, 38 bp, Artificial Sequence
  primer
gtaaaacgacggccagttgatgcttcctggtgtagtgg

SEQ ID NO: 101160 - DNA, 38 bp, Artificial Sequence
  primer
gtaaaacgacggccagtcaagctgggtacatgctcatc

SEQ ID NO: 101161 - DNA, 21 bp, Artificial Sequence
  primer
gccttgatatcatcatgtggc

SEQ ID NO: 101162 - DNA, 21 bp, Artificial Sequence
  primer
gtggatcattggattcccttc

SEQ ID NO: 101163 - DNA, 22 bp, Artificial Sequence
  primer
gacaagagtgaagctctgtccc

SEQ ID NO: 101164 - DNA, 20 bp, Artificial Sequence
  primer
accagtacaggtgccaggtg

SEQ ID NO: 101165 - DNA, 38 bp, Artificial Sequence
  primer
gtaaaacgacggccagttcagttcccagtaagggaagg

SEQ ID NO: 101166 - DNA, 40 bp, Artificial Sequence
  primer
gtaaaacgacggccagttcaacaaacttgacctgcttctc

SEQ ID NO: 101167 - DNA, 38 bp, Artificial Sequence
  primer
gtaaaacgacggccagtcctcgtccttggtagaggaag

SEQ ID NO: 101168 - DNA, 21 bp, Artificial Sequence
  primer
gcaaggtcagcatcactaagc

SEQ ID NO: 101169 - DNA, 21 bp, Artificial Sequence
  primer
gtccagcactgcagctaaatg

SEQ ID NO: 101170 - DNA, 21 bp, Artificial Sequence
  primer
atcacctggtggcagcatatc

SEQ ID NO: 101171 - DNA, 21 bp, Artificial Sequence
  primer
caggccaatgatggcataaag

SEQ ID NO: 101172 - DNA, 20 bp, Artificial Sequence
  primer
gaccagcctgagcaacaaag

SEQ ID NO: 101173 - DNA, 38 bp, Artificial Sequence
  primer
gtaaaacgacggccagtatggactgcctatggatctgg

SEQ ID NO: 101174 - DNA, 20 bp, Artificial Sequence
  primer
gagccaagattgtgccattg

SEQ ID NO: 101175 - DNA, 21 bp, Artificial Sequence
  primer
actactaggcaggagggctgg

SEQ ID NO: 101176 - DNA, 37 bp, Artificial Sequence
  primer
gtaaaacgacggccagtcaagacaacgtgggtgtgtg

SEQ ID NO: 101177 - DNA, 38 bp, Artificial Sequence
  primer
gtaaaacgacggccagttcactgccacctctttgaatg

SEQ ID NO: 101178 - DNA, 21 bp, Artificial Sequence
  primer
cagatagtggtggtggcagtg

SEQ ID NO: 101179 - DNA, 21 bp, Artificial Sequence
  primer
tagcagaggagcagagattgc

SEQ ID NO: 101180 - DNA, 21 bp, Artificial Sequence
  primer
cagtgtctgtttgcctgttgg

SEQ ID NO: 101181 - DNA, 21 bp, Artificial Sequence
  primer
cgcagaaagtggcactaagag

SEQ ID NO: 101182 - DNA, 21 bp, Artificial Sequence
  primer
gagccctggtgattctcacac

SEQ ID NO: 101183 - DNA, 21 bp, Artificial Sequence
  primer
tagattgcgttgccctgtaag

SEQ ID NO: 101184 - DNA, 39 bp, Artificial Sequence
  primer
gtaaaacgacggccagtcgaggtggaattcaaatacagg

SEQ ID NO: 101185 - DNA, 21 bp, Artificial Sequence
  primer
gcagataggaagggctttgtg

SEQ ID NO: 101186 - DNA, 37 bp, Artificial Sequence
  primer
gtaaaacgacggccagtactgcaagagccgtatgctg

SEQ ID NO: 101187 - DNA, 20 bp, Artificial Sequence
  primer
gctgtagaagccagaggctg

SEQ ID NO: 101188 - DNA, 21 bp, Artificial Sequence
  primer
agagcatctacactcaggccc

SEQ ID NO: 101189 - DNA, 20 bp, Artificial Sequence
  primer
ttggtatcgcaaagtgctgg

SEQ ID NO: 101190 - DNA, 38 bp, Artificial Sequence
  primer
gtaaaacgacggccagtttcccaatgtccctatcaacc

SEQ ID NO: 101191 - DNA, 37 bp, Artificial Sequence
  primer
gtaaaacgacggccagtacctctgagagccagcaatg

SEQ ID NO: 101192 - DNA, 22 bp, Artificial Sequence
  primer
ctgaatcaaccatgagtgctgt

SEQ ID NO: 101193 - DNA, 42 bp, Artificial Sequence
  primer
gtaaaacgacggccagtccatgtcaactgaaattgttaagtg

SEQ ID NO: 101194 - DNA, 44 bp, Artificial Sequence
  primer
gtaaaacgacggccagtgatattggatcttaatgtctggaagag

SEQ ID NO: 101195 - DNA, 23 bp, Artificial Sequence
  primer
acacctcacctacctatcaccag

SEQ ID NO: 101196 - DNA, 42 bp, Artificial Sequence
  primer
gtaaaacgacggccagtccacacttcaagccagtacagtatc

SEQ ID NO: 101197 - DNA, 42 bp, Artificial Sequence
  primer
gtaaaacgacggccagttttactgtgttcattgatcatttgt

SEQ ID NO: 101198 - DNA, 20 bp, Artificial Sequence
  primer
tccatcctttgcaggtgaac

SEQ ID NO: 101199 - DNA, 40 bp, Artificial Sequence
  primer
gtaaaacgacggccagtccaaattcattgctggtagtttg

SEQ ID NO: 101200 - DNA, 38 bp, Artificial Sequence
  primer
gtaaaacgacggccagttccaaataccacattcctcgg

SEQ ID NO: 101201 - DNA, 21 bp, Artificial Sequence
  primer
acaggaggaatggctaggagg

SEQ ID NO: 101202 - DNA, 37 bp, Artificial Sequence
  primer
gtaaaacgacggccagtgttgtggttgaggatcaggg

SEQ ID NO: 101203 - DNA, 21 bp, Artificial Sequence
  primer
gacagagcctcatcttcaccc

SEQ ID NO: 101204 - DNA, 21 bp, Artificial Sequence
  primer
gataccattgtcgcacacacc

SEQ ID NO: 101205 - DNA, 37 bp, Artificial Sequence
  primer
gtaaaacgacggccagtatcccagaatggattggtgc

SEQ ID NO: 101206 - DNA, 21 bp, Artificial Sequence
  primer
acccttgttcagagctggttc

SEQ ID NO: 101207 - DNA, 38 bp, Artificial Sequence
  primer
gtaaaacgacggccagtgggaattcacatctgctttgg

SEQ ID NO: 101208 - DNA, 21 bp, Artificial Sequence
  primer
actgctcactaagccgtgatg

SEQ ID NO: 101209 - DNA, 38 bp, Artificial Sequence
  primer
gtaaaacgacggccagtaagtgtctgctttacccacgg

SEQ ID NO: 101210 - DNA, 21 bp, Artificial Sequence
  primer
aaattgaacaggagctcaccc

SEQ ID NO: 101211 - DNA, 21 bp, Artificial Sequence
  primer
tttccaacatctgtgcctttg

SEQ ID NO: 101212 - DNA, 21 bp, Artificial Sequence
  primer
aggcagatcttctaaccctgg

SEQ ID NO: 101213 - DNA, 21 bp, Artificial Sequence
  primer
aatccaactgaagcagtcacg

SEQ ID NO: 101214 - DNA, 21 bp, Artificial Sequence
  primer
ggaggttgcagtgaattgaga

SEQ ID NO: 101215 - DNA, 21 bp, Artificial Sequence
  primer
catctgtgctgataagggctg

SEQ ID NO: 101216 - DNA, 21 bp, Artificial Sequence
  primer
tgtctactttgcgtttgggag

SEQ ID NO: 101217 - DNA, 21 bp, Artificial Sequence
  primer
gacaagtgagtggaaggaggg

SEQ ID NO: 101218 - DNA, 38 bp, Artificial Sequence
  primer
gtaaaacgacggccagttccagctcttccctcagagac

SEQ ID NO: 101219 - DNA, 21 bp, Artificial Sequence
  primer
cgggtgtctgtcgagtaacag

SEQ ID NO: 101220 - DNA, 21 bp, Artificial Sequence
  primer
tgctgacttaactacacgccc

SEQ ID NO: 101221 - DNA, 21 bp, Artificial Sequence
  primer
acaaatacaggagggcaggtc

SEQ ID NO: 101222 - DNA, 38 bp, Artificial Sequence
  primer
gtaaaacgacggccagtaaagagggaacctccacttcc

SEQ ID NO: 101223 - DNA, 21 bp, Artificial Sequence
  primer
tgagcttccctctcctgattc

SEQ ID NO: 101224 - DNA, 37 bp, Artificial Sequence
  primer
gtaaaacgacggccagtggtaggagagagcggtcagg

SEQ ID NO: 101225 - DNA, 38 bp, Artificial Sequence
  primer
gtaaaacgacggccagtaaatggatgtaggcggagttg

SEQ ID NO: 101226 - DNA, 35 bp, Artificial Sequence
  primer
gtaaaacgacggccagtactgcgttccagcctgtg

SEQ ID NO: 101227 - DNA, 37 bp, Artificial Sequence
  primer
gtaaaacgacggccagtgaacgctaagcatgtgggag

SEQ ID NO: 101228 - DNA, 26 bp, Artificial Sequence
  primer
tcattgccattgtattagatcatttg

SEQ ID NO: 101229 - DNA, 41 bp, Artificial Sequence
  primer
gtaaaacgacggccagtcaatttccttctatttcaatgcca

SEQ ID NO: 101230 - DNA, 42 bp, Artificial Sequence
  primer
gtaaaacgacggccagtgacatttagtctttacacagggctc

SEQ ID NO: 101231 - DNA, 22 bp, Artificial Sequence
  primer
aaaggaggtgtgtcctaaaggg

SEQ ID NO: 101232 - DNA, 38 bp, Artificial Sequence
  primer
gtaaaacgacggccagtatcgtgactcttgccttcacc

SEQ ID NO: 101233 - DNA, 22 bp, Artificial Sequence
  primer
tggaaatcctgaagatgtttgg

SEQ ID NO: 101234 - DNA, 21 bp, Artificial Sequence
  primer
atactcagaatccctcacggg

SEQ ID NO: 101235 - DNA, 38 bp, Artificial Sequence
  primer
gtaaaacgacggccagtcagaccagcttcacaatcagc

SEQ ID NO: 101236 - DNA, 38 bp, Artificial Sequence
  primer
gtaaaacgacggccagtatattggccgttcttcgattg

SEQ ID NO: 101237 - DNA, 38 bp, Artificial Sequence
  primer
gtaaaacgacggccagtgtttcagtttctgctgcatgg

SEQ ID NO: 101238 - DNA, 38 bp, Artificial Sequence
  primer
gtaaaacgacggccagtccttgtaccttgcaccaaagc

SEQ ID NO: 101239 - DNA, 38 bp, Artificial Sequence
  primer
gtaaaacgacggccagtcttgctctgtgacaatgaggc

SEQ ID NO: 101240 - DNA, 38 bp, Artificial Sequence
  primer
gtaaaacgacggccagttgaagaggagggcagtggtag

SEQ ID NO: 101241 - DNA, 37 bp, Artificial Sequence
  primer
gtaaaacgacggccagtacattgcaaatcacccttgc

SEQ ID NO: 101242 - DNA, 21 bp, Artificial Sequence
  primer
aacagagaagttggaggtgcc

SEQ ID NO: 101243 - DNA, 21 bp, Artificial Sequence
  primer
ctatgcatgtgggaccatgag

SEQ ID NO: 101244 - DNA, 38 bp, Artificial Sequence
  primer
gtaaaacgacggccagtctcagggtcagtgatgtttgg

SEQ ID NO: 101245 - DNA, 21 bp, Artificial Sequence
  primer
ccacctaatgaccttggcttc

SEQ ID NO: 101246 - DNA, 38 bp, Artificial Sequence
  primer
gtaaaacgacggccagtactgaagacctgaggacggag

SEQ ID NO: 101247 - DNA, 21 bp, Artificial Sequence
  primer
ggttgccacttcgttctcatc

SEQ ID NO: 101248 - DNA, 38 bp, Artificial Sequence
  primer
gtaaaacgacggccagtagaattcagggaacatgaggg

SEQ ID NO: 101249 - DNA, 38 bp, Artificial Sequence
  primer
gtaaaacgacggccagttggcagtgctgtgaatacctc

SEQ ID NO: 101250 - DNA, 21 bp, Artificial Sequence
  primer
tccaaatcttcaactccaccc

SEQ ID NO: 101251 - DNA, 38 bp, Artificial Sequence
  primer
gtaaaacgacggccagtaaacaggatggagcaaagcac

SEQ ID NO: 101252 - DNA, 38 bp, Artificial Sequence
  primer
gtaaaacgacggccagtctaaggagagaggccaagctg

SEQ ID NO: 101253 - DNA, 38 bp, Artificial Sequence
  primer
gtaaaacgacggccagttaactaagtggtggccgtgag

SEQ ID NO: 101254 - DNA, 38 bp, Artificial Sequence
  primer
gtaaaacgacggccagtgcctctcatggtcaagggtag

SEQ ID NO: 101255 - DNA, 38 bp, Artificial Sequence
  primer
gtaaaacgacggccagtcccaccaagaagtctacgacc

SEQ ID NO: 101256 - DNA, 38 bp, Artificial Sequence
  primer
gtaaaacgacggccagtacagtcctggaagatgcgaac

SEQ ID NO: 101257 - DNA, 38 bp, Artificial Sequence
  primer
gtaaaacgacggccagtagatcgtcctttgagaggcag

SEQ ID NO: 101258 - DNA, 38 bp, Artificial Sequence
  primer
gtaaaacgacggccagtctgacagtcgaccctgtgaag

SEQ ID NO: 101259 - DNA, 38 bp, Artificial Sequence
  primer
gtaaaacgacggccagtgagctggaattcaaccctgac

SEQ ID NO: 101260 - DNA, 21 bp, Artificial Sequence
  primer
ggaagaccattgtgttcagcc

SEQ ID NO: 101261 - DNA, 21 bp, Artificial Sequence
  primer
gaattaagggcaccctctgtg

SEQ ID NO: 101262 - DNA, 38 bp, Artificial Sequence
  primer
gtaaaacgacggccagttgtagtcaagcttgggctgag

SEQ ID NO: 101263 - DNA, 20 bp, Artificial Sequence
  primer
agctgttccaatggatgacg

SEQ ID NO: 101264 - DNA, 21 bp, Artificial Sequence
  primer
catcacctacactggtccctg

SEQ ID NO: 101265 - DNA, 38 bp, Artificial Sequence
  primer
gtaaaacgacggccagtaaggacccagttacctccctc

SEQ ID NO: 101266 - DNA, 22 bp, Artificial Sequence
  primer
gcctgaagtactatctggtccc

SEQ ID NO: 101267 - DNA, 38 bp, Artificial Sequence
  primer
gtaaaacgacggccagtaagcaatcttaagtgcgctgg

SEQ ID NO: 101268 - DNA, 38 bp, Artificial Sequence
  primer
gtaaaacgacggccagtctcgcagacaggatgacagag

SEQ ID NO: 101269 - DNA, 21 bp, Artificial Sequence
  primer
aaagtccctggagagcagatg

SEQ ID NO: 101270 - DNA, 21 bp, Artificial Sequence
  primer
caactgaagtctctgggagcc

SEQ ID NO: 101271 - DNA, 38 bp, Artificial Sequence
  primer
gtaaaacgacggccagtaatgacagcagagctaagggc

SEQ ID NO: 101272 - DNA, 21 bp, Artificial Sequence
  primer
gtcaggtgagaagatccagcc

SEQ ID NO: 101273 - DNA, 21 bp, Artificial Sequence
  primer
gtcaggtgagaagatccagcc

SEQ ID NO: 101274 - DNA, 21 bp, Artificial Sequence
  primer
attctatggctggaaacaggc

SEQ ID NO: 101275 - DNA, 21 bp, Artificial Sequence
  primer
cctctcacagtcactcctccc

SEQ ID NO: 101276 - DNA, 38 bp, Artificial Sequence
  primer
gtaaaacgacggccagtcagacaagggaactgagaccc

SEQ ID NO: 101277 - DNA, 21 bp, Artificial Sequence
  primer
ttccaggaggttgggtgttag

SEQ ID NO: 101278 - DNA, 38 bp, Artificial Sequence
  primer
gtaaaacgacggccagtctcctccttacccaagttccc

SEQ ID NO: 101279 - DNA, 21 bp, Artificial Sequence
  primer
ctctggctacctggctacctg

SEQ ID NO: 101280 - DNA, 21 bp, Artificial Sequence
  primer
gaaggatggctgtatgaaggc

SEQ ID NO: 101281 - DNA, 37 bp, Artificial Sequence
  primer
gtaaaacgacggccagtctcccatgagcagcaaagag

SEQ ID NO: 101282 - DNA, 39 bp, Artificial Sequence
  primer
gtaaaacgacggccagtcctgtaagcaaagtggacaagg

SEQ ID NO: 101283 - DNA, 19 bp, Artificial Sequence
  primer
gggaaggagatggagggag

SEQ ID NO: 101284 - DNA, 37 bp, Artificial Sequence
  primer
gtaaaacgacggccagtctccctctggcctcagtctc

SEQ ID NO: 101285 - DNA, 21 bp, Artificial Sequence
  primer
aagtctgccttgcggtagaag

SEQ ID NO: 101286 - DNA, 21 bp, Artificial Sequence
  primer
tgagttgacagggaactttgg

SEQ ID NO: 101287 - DNA, 21 bp, Artificial Sequence
  primer
catgaacccaggttgtctgtg

SEQ ID NO: 101288 - DNA, 20 bp, Artificial Sequence
  primer
cagccgttcttgagatttcc

SEQ ID NO: 101289 - DNA, 21 bp, Artificial Sequence
  primer
gtgtggcagaaaccacatctc

SEQ ID NO: 101290 - DNA, 21 bp, Artificial Sequence
  primer
cgtggaataaatgcatctccc

SEQ ID NO: 101291 - DNA, 23 bp, Artificial Sequence
  primer
tgtgcacgtatgtatgtgttgtg

SEQ ID NO: 101292 - DNA, 21 bp, Artificial Sequence
  primer
tcatgccagtgattgcttagg

SEQ ID NO: 101293 - DNA, 37 bp, Artificial Sequence
  primer
gtaaaacgacggccagtacatttctggcaacagtggg

SEQ ID NO: 101294 - DNA, 38 bp, Artificial Sequence
  primer
gtaaaacgacggccagtgagacacagaggacgagggag

SEQ ID NO: 101295 - DNA, 21 bp, Artificial Sequence
  primer
aacagagcgaagcctcttcag

SEQ ID NO: 101296 - DNA, 20 bp, Artificial Sequence
  primer
ctcctaatccgctcctgctc

SEQ ID NO: 101297 - DNA, 21 bp, Artificial Sequence
  primer
tgcatctaccaagccgtagac

SEQ ID NO: 101298 - DNA, 23 bp, Artificial Sequence
  primer
ttgaacctaggaggttgagactg

SEQ ID NO: 101299 - DNA, 21 bp, Artificial Sequence
  primer
ggtaaccaaatgagccctgac

SEQ ID NO: 101300 - DNA, 20 bp, Artificial Sequence
  primer
catcttctcttgagccgtgg

SEQ ID NO: 101301 - DNA, 20 bp, Artificial Sequence
  primer
atgtaccagatggtgccagg

SEQ ID NO: 101302 - DNA, 27 bp, Artificial Sequence
  primer
ccctagataattcacctagtcaaggac

SEQ ID NO: 101303 - DNA, 21 bp, Artificial Sequence
  primer
tattggttagtggccatgctg

SEQ ID NO: 101304 - DNA, 39 bp, Artificial Sequence
  primer
gtaaaacgacggccagttgtctcaccactcgtaccttcc

SEQ ID NO: 101305 - DNA, 37 bp, Artificial Sequence
  primer
gtaaaacgacggccagtcaaagatgggcaaatgatcc

SEQ ID NO: 101306 - DNA, 22 bp, Artificial Sequence
  primer
gcaattatccatgcagatagcc

SEQ ID NO: 101307 - DNA, 38 bp, Artificial Sequence
  primer
gtaaaacgacggccagtttgagaggcagaaacttcagg

SEQ ID NO: 101308 - DNA, 21 bp, Artificial Sequence
  primer
agcattgatgagggcagaaag

SEQ ID NO: 101309 - DNA, 38 bp, Artificial Sequence
  primer
gtaaaacgacggccagtgccaaatagcatttaccagcc

SEQ ID NO: 101310 - DNA, 43 bp, Artificial Sequence
  primer
gtaaaacgacggccagttcctccataaagtttacaaagacctg

SEQ ID NO: 101311 - DNA, 42 bp, Artificial Sequence
  primer
gtaaaacgacggccagtttgttcaaatccaactagtctctgc

SEQ ID NO: 101312 - DNA, 27 bp, Artificial Sequence
  primer
gctgaagagagacctgtaatttatttg

SEQ ID NO: 101313 - DNA, 40 bp, Artificial Sequence
  primer
gtaaaacgacggccagtgaactctgagagcacgttattgc

SEQ ID NO: 101314 - DNA, 21 bp, Artificial Sequence
  primer
cctttgataaatctgagcggg

SEQ ID NO: 101315 - DNA, 41 bp, Artificial Sequence
  primer
gtaaaacgacggccagttcacaatcataatacggttctccc

SEQ ID NO: 101316 - DNA, 37 bp, Artificial Sequence
  primer
gtaaaacgacggccagtggaattagagtgggcgtttg

SEQ ID NO: 101317 - DNA, 36 bp, Artificial Sequence
  primer
gtaaaacgacggccagtgtcccagcatgtcgtttcc

SEQ ID NO: 101318 - DNA, 18 bp, Artificial Sequence
  primer
cccggctcctccagtacc

SEQ ID NO: 101319 - DNA, 21 bp, Artificial Sequence
  primer
agctgacaagatcaccagcag

SEQ ID NO: 101320 - DNA, 26 bp, Artificial Sequence
  primer
gcatgtaagataaccatatcaaccac

SEQ ID NO: 101321 - DNA, 21 bp, Artificial Sequence
  primer
tgcaccatgcacacttaagac

SEQ ID NO: 101322 - DNA, 38 bp, Artificial Sequence
  primer
gtaaaacgacggccagtctcttggacaggatcttgctg

SEQ ID NO: 101323 - DNA, 35 bp, Artificial Sequence
  primer
gtaaaacgacggccagtgggaagaaagccgaccac

SEQ ID NO: 101324 - DNA, 19 bp, Artificial Sequence
  primer
gccaagaggaactcagccc

SEQ ID NO: 101325 - DNA, 36 bp, Artificial Sequence
  primer
gtaaaacgacggccagtgatcaaacaggcccaaagc

SEQ ID NO: 101326 - DNA, 38 bp, Artificial Sequence
  primer
gtaaaacgacggccagtccgcatcatacatgacctcag

SEQ ID NO: 101327 - DNA, 20 bp, Artificial Sequence
  primer
aaggcaggaacttgggattg

SEQ ID NO: 101328 - DNA, 36 bp, Artificial Sequence
  primer
gtaaaacgacggccagtccagccgctctagtccaag

SEQ ID NO: 101329 - DNA, 20 bp, Artificial Sequence
  primer
cagagggtgtcctacctggg

SEQ ID NO: 101330 - DNA, 38 bp, Artificial Sequence
  primer
gtaaaacgacggccagtgagggcgagcatgttctttac

SEQ ID NO: 101331 - DNA, 21 bp, Artificial Sequence
  primer
tagcctctttcactgtgtgcc

SEQ ID NO: 101332 - DNA, 21 bp, Artificial Sequence
  primer
ccagaaaggaagggatgattg

SEQ ID NO: 101333 - DNA, 38 bp, Artificial Sequence
  primer
gtaaaacgacggccagttcagacagctgggactacacc

SEQ ID NO: 101334 - DNA, 38 bp, Artificial Sequence
  primer
gtaaaacgacggccagtaaacagggtgacacagacacg

SEQ ID NO: 101335 - DNA, 18 bp, Artificial Sequence
  primer
ctcaggtgacccacccac

SEQ ID NO: 101336 - DNA, 21 bp, Artificial Sequence
  primer
tctgtagcctggagctctgtg

SEQ ID NO: 101337 - DNA, 39 bp, Artificial Sequence
  primer
gtaaaacgacggccagttggctcaccatatctgaacaag

SEQ ID NO: 101338 - DNA, 21 bp, Artificial Sequence
  primer
ccgtctcaatcctcatactcg

SEQ ID NO: 101339 - DNA, 38 bp, Artificial Sequence
  primer
gtaaaacgacggccagtgatcctggaccctatttcagg

SEQ ID NO: 101340 - DNA, 38 bp, Artificial Sequence; identical to SEQ ID NO: 101339
  primer

SEQ ID NO: 101341 - DNA, 38 bp, Artificial Sequence
  primer
gtaaaacgacggccagtgatctggacaacctcgtctcc

SEQ ID NO: 101342 - DNA, 20 bp, Artificial Sequence
  primer
gcagaggatgctctcaccag

SEQ ID NO: 101343 - DNA, 21 bp, Artificial Sequence
  primer
accaggaacaaagcaatggag

SEQ ID NO: 101344 - DNA, 38 bp, Artificial Sequence
  primer
gtaaaacgacggccagtgcatccatggagctttgagac

SEQ ID NO: 101345 - DNA, 21 bp, Artificial Sequence
  primer
gaggcagagtctgtcagggag

SEQ ID NO: 101346 - DNA, 38 bp, Artificial Sequence
  primer
gtaaaacgacggccagtaaaggacagcagaagggtgag

SEQ ID NO: 101347 - DNA, 38 bp, Artificial Sequence
  primer
gtaaaacgacggccagtggtcttgcccagcatgtaaag

SEQ ID NO: 101348 - DNA, 22 bp, Artificial Sequence
  primer
aaagccttggaccaggaataag

SEQ ID NO: 101349 - DNA, 21 bp, Artificial Sequence
  primer
tatcagcagcgaagatgaagg

SEQ ID NO: 101350 - DNA, 39 bp, Artificial Sequence
  primer
gtaaaacgacggccagtggaatttgtatctccaggctcc

SEQ ID NO: 101351 - DNA, 20 bp, Artificial Sequence
  primer
ggcatttgagttcctagccc

SEQ ID NO: 101352 - DNA, 38 bp, Artificial Sequence
  primer
gtaaaacgacggccagtgtggaaagcacagagggtttc

SEQ ID NO: 101353 - DNA, 38 bp, Artificial Sequence
  primer
gtaaaacgacggccagtcttcactgctgtctgtgggag

SEQ ID NO: 101354 - DNA, 21 bp, Artificial Sequence
  primer
ggagctgagtctggagtctgg

SEQ ID NO: 101355 - DNA, 37 bp, Artificial Sequence
  primer
gtaaaacgacggccagtgtcctggacacgtcagaagc

SEQ ID NO: 101356 - DNA, 37 bp, Artificial Sequence
  primer
gtaaaacgacggccagtgctgccctctagctctctgg

SEQ ID NO: 101357 - DNA, 21 bp, Artificial Sequence
  primer
tatcaggtccagctggttgag

SEQ ID NO: 101358 - DNA, 38 bp, Artificial Sequence
  primer
gtaaaacgacggccagtctctgcctgtccaatcctttc

SEQ ID NO: 101359 - DNA, 24 bp, Artificial Sequence
  primer
tggtacataggatacttcccattg

SEQ ID NO: 101360 - DNA, 24 bp, Artificial Sequence
  primer
tctcatttcaaattctccttgctc

SEQ ID NO: 101361 - DNA, 21 bp, Artificial Sequence
  primer
gattcccacattcagaggctg

SEQ ID NO: 101362 - DNA, 27 bp, Artificial Sequence
  primer
tgaacagaatgaatgctactaactcag

SEQ ID NO: 101363 - DNA, 21 bp, Artificial Sequence
  primer
caggaatttcatttcattggc

SEQ ID NO: 101364 - DNA, 38 bp, Artificial Sequence
  primer
gtaaaacgacggccagttatgctgctgagatgaggcac

SEQ ID NO: 101365 - DNA, 40 bp, Artificial Sequence
  primer
gtaaaacgacggccagttgttccttcagaattgactttgc

SEQ ID NO: 101366 - DNA, 23 bp, Artificial Sequence
  primer
cgcctaagtaactctcacaaccc

SEQ ID NO: 101367 - DNA, 23 bp, Artificial Sequence
  primer
tttccactgaagccataacaatc

SEQ ID NO: 101368 - DNA, 26 bp, Artificial Sequence
  primer
aaatccaacttgctacaactatgaac

SEQ ID NO: 101369 - DNA, 22 bp, Artificial Sequence
  primer
tcttctaaaccacactgggctc

SEQ ID NO: 101370 - DNA, 23 bp, Artificial Sequence
  primer
ttggccttaaggtgattatacga

SEQ ID NO: 101371 - DNA, 21 bp, Artificial Sequence
  primer
aaccaaataattctgacgggc

SEQ ID NO: 101372 - DNA, 20 bp, Artificial Sequence
  primer
gctgcatggagctattctgg

SEQ ID NO: 101373 - DNA, 21 bp, Artificial Sequence
  primer
tttgagcgttcagtccctatc

SEQ ID NO: 101374 - DNA, 24 bp, Artificial Sequence
  primer
tgatgacatatttattctgcctgg

SEQ ID NO: 101375 - DNA, 38 bp, Artificial Sequence
  primer
gtaaaacgacggccagtttccatttagcacttgcatcc

SEQ ID NO: 101376 - DNA, 21 bp, Artificial Sequence
  primer
ggtcaccaagggagacctaac

SEQ ID NO: 101377 - DNA, 37 bp, Artificial Sequence
  primer
gtaaaacgacggccagttgcttgcctcttcttctccc

SEQ ID NO: 101378 - DNA, 27 bp, Artificial Sequence
  primer
tcattaaagatagtggtattgtgacca

SEQ ID NO: 101379 - DNA, 21 bp, Artificial Sequence
  primer
atctttgcaatggactgaccc

SEQ ID NO: 101380 - DNA, 38 bp, Artificial Sequence
  primer
gtaaaacgacggccagttcagttccaggatcatggttg

SEQ ID NO: 101381 - DNA, 21 bp, Artificial Sequence
  primer
tacttggtgatggccttgatg

SEQ ID NO: 101382 - DNA, 20 bp, Artificial Sequence
  primer
ctgttgacagcacctgctcc

SEQ ID NO: 101383 - DNA, 38 bp, Artificial Sequence
  primer
gtaaaacgacggccagttaacaagcacctgtctgctgg

SEQ ID NO: 101384 - DNA, 19 bp, Artificial Sequence
  primer
gaagatctgccgcttggtc

SEQ ID NO: 101385 - DNA, 18 bp, Artificial Sequence
  primer
gatgccatgcagggagag

SEQ ID NO: 101386 - DNA, 36 bp, Artificial Sequence
  primer
gtaaaacgacggccagtaggcgtcagggagaacaag

SEQ ID NO: 101387 - DNA, 19 bp, Artificial Sequence
  primer
cctgacctcgagatccacc

SEQ ID NO: 101388 - DNA, 21 bp, Artificial Sequence
  primer
cactctcaaacaggtcgttgg

SEQ ID NO: 101389 - DNA, 21 bp, Artificial Sequence
  primer
aatttgcaaacgagtgaatgc

SEQ ID NO: 101390 - DNA, 35 bp, Artificial Sequence
  primer
gtaaaacgacggccagtattgagggaccacagggc

SEQ ID NO: 101391 - DNA, 20 bp, Artificial Sequence
  primer
gggctgagactgagagtggg

SEQ ID NO: 101392 - DNA, 21 bp, Artificial Sequence
  primer
ctgacactcacagacccttgg

SEQ ID NO: 101393 - DNA, 35 bp, Artificial Sequence
  primer
gtaaaacgacggccagtcgcgaagagcaaacgaag

SEQ ID NO: 101394 - DNA, 21 bp, Artificial Sequence
  primer
gaccttcttcactgagcctgg

SEQ ID NO: 101395 - DNA, 23 bp, Artificial Sequence
  primer
tctgtgtaagctgtgtcaagtcc

SEQ ID NO: 101396 - DNA, 20 bp, Artificial Sequence
  primer
ctgatgtcagcagcctttcc

SEQ ID NO: 101397 - DNA, 27 bp, Artificial Sequence
  primer
cttctgtctattcttaggagaggctta

SEQ ID NO: 101398 - DNA, 20 bp, Artificial Sequence
  primer
tcccagcaaagtccacattc

SEQ ID NO: 101399 - DNA, 21 bp, Artificial Sequence
  primer
ttgtagaagcgggtgacagtg

SEQ ID NO: 101400 - DNA, 38 bp, Artificial Sequence
  primer
gtaaaacgacggccagtagcctcacgtggttaggaaag

SEQ ID NO: 101401 - DNA, 36 bp, Artificial Sequence
  primer
gtaaaacgacggccagtacacacatcagggcacagg

SEQ ID NO: 101402 - DNA, 21 bp, Artificial Sequence
  primer
attaacaacgattggtgcctg

SEQ ID NO: 101403 - DNA, 21 bp, Artificial Sequence
  primer
atgaagaaatgtccacccagc

SEQ ID NO: 101404 - DNA, 38 bp, Artificial Sequence
  primer
gtaaaacgacggccagtggcttgtccaggctgattaac

SEQ ID NO: 101405 - DNA, 21 bp, Artificial Sequence
  primer
aacctaagctcccatggtctg

SEQ ID NO: 101406 - DNA, 37 bp, Artificial Sequence
  primer
gtaaaacgacggccagtgaatggtgcacacatccctc

SEQ ID NO: 101407 - DNA, 21 bp, Artificial Sequence
  primer
ggaagggctagaagaggaagg

SEQ ID NO: 101408 - DNA, 38 bp, Artificial Sequence
  primer
gtaaaacgacggccagtaaggaggtcggaggtttaacg

SEQ ID NO: 101409 - DNA, 39 bp, Artificial Sequence
  primer
gtaaaacgacggccagtcggatttccacaattgtacctc

SEQ ID NO: 101410 - DNA, 38 bp, Artificial Sequence
  primer
gtaaaacgacggccagtggcagaacattctgtcacctg

SEQ ID NO: 101411 - DNA, 22 bp, Artificial Sequence
  primer
tctcgttattgatgttctgccc

SEQ ID NO: 101412 - DNA, 38 bp, Artificial Sequence
  primer
gtaaaacgacggccagtcttgcgtagcggtttgatctc

SEQ ID NO: 101413 - DNA, 38 bp, Artificial Sequence
  primer
gtaaaacgacggccagtcagcagcgaaatgaagatcac

SEQ ID NO: 101414 - DNA, 21 bp, Artificial Sequence
  primer
ttggtgaggaagatggtgttg

SEQ ID NO: 101415 - DNA, 38 bp, Artificial Sequence
  primer
gtaaaacgacggccagtgtcgttgtagggatcggtgac

SEQ ID NO: 101416 - DNA, 21 bp, Artificial Sequence
  primer
aattcttccagcatagcgtcc

SEQ ID NO: 101417 - DNA, 38 bp, Artificial Sequence
  primer
gtaaaacgacggccagtgggttggtctgagggtagagg

SEQ ID NO: 101418 - DNA, 36 bp, Artificial Sequence
  primer
gtaaaacgacggccagtaattcaagcacccaccacc

SEQ ID NO: 101419 - DNA, 19 bp, Artificial Sequence
  primer
cacccaggaccaagagctg

SEQ ID NO: 101420 - DNA, 38 bp, Artificial Sequence
  primer
gtaaaacgacggccagtgcttgaattcctccaggacag

SEQ ID NO: 101421 - DNA, 39 bp, Artificial Sequence
  primer
gtaaaacgacggccagtaaggcttccataactctccacc

SEQ ID NO: 101422 - DNA, 37 bp, Artificial Sequence
  primer
gtaaaacgacggccagttggcctctgacgcaacatac

SEQ ID NO: 101423 - DNA, 36 bp, Artificial Sequence
  primer
gtaaaacgacggccagtggagcagagtcagtgtcgg

SEQ ID NO: 101424 - DNA, 38 bp, Artificial Sequence
  primer
gtaaaacgacggccagtacccaccacctcaattgtttg

SEQ ID NO: 101425 - DNA, 37 bp, Artificial Sequence
  primer
gtaaaacgacggccagtgagagcccaagtgatgatgg

SEQ ID NO: 101426 - DNA, 21 bp, Artificial Sequence
  primer
gtccctcaggatgagtggaag

SEQ ID NO: 101427 - DNA, 20 bp, Artificial Sequence
  primer
ggcgagagtgcaagtctgtg

SEQ ID NO: 101428 - DNA, 23 bp, Artificial Sequence
  primer
ccaggcattgatgtctagttctg

SEQ ID NO: 101429 - DNA, 38 bp, Artificial Sequence
  primer
gtaaaacgacggccagtattgtgagggaggtgttgacc

SEQ ID NO: 101430 - DNA, 21 bp, Artificial Sequence
  primer
ggcaccctggatcatattgag

SEQ ID NO: 101431 - DNA, 21 bp, Artificial Sequence
  primer
tccaacttggtgtcatggaag

SEQ ID NO: 101432 - DNA, 38 bp, Artificial Sequence
  primer
gtaaaacgacggccagtgaagcataggaagcgataggc

SEQ ID NO: 101433 - DNA, 21 bp, Artificial Sequence
  primer
ctcctgtgtccctgcactatg

SEQ ID NO: 101434 - DNA, 20 bp, Artificial Sequence
  primer
ggctgtgttgtctctgcacc

SEQ ID NO: 101435 - DNA, 39 bp, Artificial Sequence
  primer
gtaaaacgacggccagtgcctgacctgtgagatcaagag

SEQ ID NO: 101436 - DNA, 20 bp, Artificial Sequence
  primer
agctccctctgctcttccac

SEQ ID NO: 101437 - DNA, 21 bp, Artificial Sequence
  primer
tgggctatgatcacaccactg

SEQ ID NO: 101438 - DNA, 21 bp, Artificial Sequence
  primer
aggttccctctcttcatgtgg

SEQ ID NO: 101439 - DNA, 22 bp, Artificial Sequence
  primer
cgaactcgtccactctggtaag

SEQ ID NO: 101440 - DNA, 38 bp, Artificial Sequence
  primer
gtaaaacgacggccagtgtcagagctgaggcctttcac

SEQ ID NO: 101441 - DNA, 38 bp, Artificial Sequence
  primer
gtaaaacgacggccagtatgtccataagcaggatttgc

SEQ ID NO: 101442 - DNA, 21 bp, Artificial Sequence
  primer
ttacctttcatgcaacatgcc

SEQ ID NO: 101443 - DNA, 38 bp, Artificial Sequence
  primer
gtaaaacgacggccagtatccagctacaatcacttccg

SEQ ID NO: 101444 - DNA, 42 bp, Artificial Sequence
  primer
gtaaaacgacggccagtcattatgagatcaaggcttagggac

SEQ ID NO: 101445 - DNA, 22 bp, Artificial Sequence
  primer
tgagctggaagaattcaacagg

SEQ ID NO: 101446 - DNA, 21 bp, Artificial Sequence
  primer
atgggcatagttctgtttggc

SEQ ID NO: 101447 - DNA, 35 bp, Artificial Sequence
  primer
gtaaaacgacggccagtgggaggagagggagaggg

SEQ ID NO: 101448 - DNA, 21 bp, Artificial Sequence
  primer
actagcctggaaacctctggc

SEQ ID NO: 101449 - DNA, 23 bp, Artificial Sequence
  primer
aacaaacccaactactccatgtg

SEQ ID NO: 101450 - DNA, 39 bp, Artificial Sequence
  primer
gtaaaacgacggccagtaatttggttacgtactgcctgc

SEQ ID NO: 101451 - DNA, 38 bp, Artificial Sequence
  primer
gtaaaacgacggccagtttcgatcaatgggtagatggc

SEQ ID NO: 101452 - DNA, 41 bp, Artificial Sequence
  primer
gtaaaacgacggccagtgggagaaaggaggaagtacaaatc

SEQ ID NO: 101453 - DNA, 22 bp, Artificial Sequence
  primer
tggttgagcttcctcaacactc

SEQ ID NO: 101454 - DNA, 21 bp, Artificial Sequence
  primer
ctcgaattcctgaccttgtgg

SEQ ID NO: 101455 - DNA, 27 bp, Artificial Sequence
  primer
tttctttagtttattactgctgcacaa

SEQ ID NO: 101456 - DNA, 39 bp, Artificial Sequence
  primer
gtaaaacgacggccagtcctcttcttccgcaagtctaca

SEQ ID NO: 101457 - DNA, 44 bp, Artificial Sequence
  primer
gtaaaacgacggccagttttcctcttagagtcacgttctatttg

SEQ ID NO: 101458 - DNA, 23 bp, Artificial Sequence
  primer
ccttatcacagtgactccaaacc

SEQ ID NO: 101459 - DNA, 38 bp, Artificial Sequence
  primer
gtaaaacgacggccagtcacatcaacacatggccctac

SEQ ID NO: 101460 - DNA, 38 bp, Artificial Sequence
  primer
gtaaaacgacggccagtatatcagggcactttgagctg

SEQ ID NO: 101461 - DNA, 37 bp, Artificial Sequence
  primer
gtaaaacgacggccagtaaggtcaaggctgcagtgag

SEQ ID NO: 101462 - DNA, 27 bp, Artificial Sequence
  primer
tgtacctatatcatgccaatcattaag

SEQ ID NO: 101463 - DNA, 40 bp, Artificial Sequence
  primer
gtaaaacgacggccagtggatgggagatacaaaggaagac

SEQ ID NO: 101464 - DNA, 43 bp, Artificial Sequence
  primer
gtaaaacgacggccagtttccctttgagtttattacctctacc

SEQ ID NO: 101465 - DNA, 23 bp, Artificial Sequence
  primer
aaggcacagggtatgcctataaa

SEQ ID NO: 101466 - DNA, 25 bp, Artificial Sequence
  primer
ttaaatagctccaaacagccaatac

SEQ ID NO: 101467 - DNA, 38 bp, Artificial Sequence
  primer
gtaaaacgacggccagtcaaattggaaatccaagtgcc

SEQ ID NO: 101468 - DNA, 38 bp, Artificial Sequence
  primer
gtaaaacgacggccagtcgaaataccctgccttcactg

SEQ ID NO: 101469 - DNA, 21 bp, Artificial Sequence
  primer
atgcatgaactgtcaggatgg

SEQ ID NO: 101470 - DNA, 21 bp, Artificial Sequence
  primer
cctaggaatccagagggaagg

SEQ ID NO: 101471 - DNA, 21 bp, Artificial Sequence
  primer
aataagtggtaacgcccagtg

SEQ ID NO: 101472 - DNA, 38 bp, Artificial Sequence
  primer
gtaaaacgacggccagttcagctcaaattcctgcaaac

SEQ ID NO: 101473 - DNA, 38 bp, Artificial Sequence
  primer
gtaaaacgacggccagtaccctgctgtcctaattccag

SEQ ID NO: 101474 - DNA, 21 bp, Artificial Sequence
  primer
taaatcacccacacccatgtc

SEQ ID NO: 101475 - DNA, 23 bp, Artificial Sequence
  primer
gccatgactacattctacgttgg

SEQ ID NO: 101476 - DNA, 24 bp, Artificial Sequence
  primer
ggaagtctaagtgtccgacctacc

SEQ ID NO: 101477 - DNA, 21 bp, Artificial Sequence
  primer
ttctccattgactggcaacac

SEQ ID NO: 101478 - DNA, 21 bp, Artificial Sequence
  primer
ccttaccaaagctacccaccc

SEQ ID NO: 101479 - DNA, 39 bp, Artificial Sequence
  primer
gtaaaacgacggccagtccacatgtacgcaatactgagc

SEQ ID NO: 101480 - DNA, 21 bp, Artificial Sequence
  primer
catgcctgtattcccagctac

SEQ ID NO: 101481 - DNA, 39 bp, Artificial Sequence
  primer
gtaaaacgacggccagttgaacagcacatgaatgtaggc

SEQ ID NO: 101482 - DNA, 21 bp, Artificial Sequence
  primer
tcactgaggaatggctttcag

SEQ ID NO: 101483 - DNA, 23 bp, Artificial Sequence
  primer
caaacactgtacaatttgggtgc

SEQ ID NO: 101484 - DNA, 40 bp, Artificial Sequence
  primer
gtaaaacgacggccagtgggtaggaaagtgctgaacagtc

SEQ ID NO: 101485 - DNA, 38 bp, Artificial Sequence
  primer
gtaaaacgacggccagtcaaatggaccacacacaggac

SEQ ID NO: 101486 - DNA, 23 bp, Artificial Sequence
  primer
gaacattccttcactattgtggc

SEQ ID NO: 101487 - DNA, 22 bp, Artificial Sequence
  primer
gcagactgagtgacagagcaac

SEQ ID NO: 101488 - DNA, 39 bp, Artificial Sequence
  primer
gtaaaacgacggccagttcagctgacccaacctagagac

SEQ ID NO: 101489 - DNA, 21 bp, Artificial Sequence
  primer
ggaggctgatcccaacagtag

SEQ ID NO: 101490 - DNA, 21 bp, Artificial Sequence
  primer
tggcgacttcaaatactgcac

SEQ ID NO: 101491 - DNA, 40 bp, Artificial Sequence
  primer
gtaaaacgacggccagtcaattattcccattcctttcacc

SEQ ID NO: 101492 - DNA, 42 bp, Artificial Sequence
  primer
gtaaaacgacggccagttgtttctgacaagaaataccagaca

SEQ ID NO: 101493 - DNA, 39 bp, Artificial Sequence
  primer
gtaaaacgacggccagtgcatggacttctcggatttagg

SEQ ID NO: 101494 - DNA, 38 bp, Artificial Sequence
  primer
gtaaaacgacggccagtgtgactgcaaatggtacaggg

SEQ ID NO: 101495 - DNA, 22 bp, Artificial Sequence
  primer
tgcaccttgaattattgactgc

SEQ ID NO: 101496 - DNA, 21 bp, Artificial Sequence
  primer
gcaaggttcatatctggcagt

SEQ ID NO: 101497 - DNA, 37 bp, Artificial Sequence
  primer
gtaaaacgacggccagtggaggtggacaagcaagaag

SEQ ID NO: 101498 - DNA, 39 bp, Artificial Sequence
  primer
gtaaaacgacggccagtagagccaaacttgttgggtaag

SEQ ID NO: 101499 - DNA, 22 bp, Artificial Sequence
  primer
gggcaataagagagaaactccg

SEQ ID NO: 101500 - DNA, 23 bp, Artificial Sequence
  primer
ttacaaagtggttcctcctatgc

SEQ ID NO: 101501 - DNA, 25 bp, Artificial Sequence
  primer
tctcttccagaaagactcagaaaca

SEQ ID NO: 101502 - DNA, 37 bp, Artificial Sequence; identical to SEQ ID NO: 8674
  primer

SEQ ID NO: 101503 - DNA, 21 bp, Artificial Sequence
  primer
tgctgcagtgaagcctagaag

SEQ ID NO: 101504 - DNA, 38 bp, Artificial Sequence
  primer
gtaaaacgacggccagttgcctaaatttccacacatcc

SEQ ID NO: 101505 - DNA, 21 bp, Artificial Sequence
  primer
cacagtcctggcagagttgac

SEQ ID NO: 101506 - DNA, 18 bp, Artificial Sequence
  primer
aggcatgagccactgtgc

SEQ ID NO: 101507 - DNA, 21 bp, Artificial Sequence
  primer
tgcttgagcctaggagtttgg

SEQ ID NO: 101508 - DNA, 41 bp, Artificial Sequence
  primer
gtaaaacgacggccagtaaattaacagccttcaccatcttt

SEQ ID NO: 101509 - DNA, 39 bp, Artificial Sequence
  primer
gtaaaacgacggccagtggtgtaaccaatttgctggttc

SEQ ID NO: 101510 - DNA, 21 bp, Artificial Sequence
  primer
ggatacaagcaccaaagggac

SEQ ID NO: 101511 - DNA, 27 bp, Artificial Sequence
  primer
ggatcaataaggtctgaaataatgagg

SEQ ID NO: 101512 - DNA, 38 bp, Artificial Sequence
  primer
gtaaaacgacggccagtcagtgaaaggcactgaaccag

SEQ ID NO: 101513 - DNA, 39 bp, Artificial Sequence
  primer
gtaaaacgacggccagtaagccacacctcaagaacaaag

SEQ ID NO: 101514 - DNA, 43 bp, Artificial Sequence
  primer
gtaaaacgacggccagtatttaaagaccagtatgttgaattgc

SEQ ID NO: 101515 - DNA, 23 bp, Artificial Sequence
  primer
ctttgctatcatggtattctggg

SEQ ID NO: 101516 - DNA, 43 bp, Artificial Sequence
  primer
gtaaaacgacggccagttttccacattcttcagaagttaggtt

SEQ ID NO: 101517 - DNA, 21 bp, Artificial Sequence
  primer
atgttagtaacccgacctggg

SEQ ID NO: 101518 - DNA, 38 bp, Artificial Sequence
  primer
gtaaaacgacggccagtggaatgacccagagaatcagc

SEQ ID NO: 101519 - DNA, 39 bp, Artificial Sequence
  primer
gtaaaacgacggccagttcagatggaacatggaagtctg

SEQ ID NO: 101520 - DNA, 21 bp, Artificial Sequence
  primer
tgcggttatggttgtaacctg

SEQ ID NO: 101521 - DNA, 38 bp, Artificial Sequence
  primer
gtaaaacgacggccagtcacccagcttcagcattaagt

SEQ ID NO: 101522 - DNA, 40 bp, Artificial Sequence
  primer
gtaaaacgacggccagtggagatggaattaaacagttggc

SEQ ID NO: 101523 - DNA, 20 bp, Artificial Sequence
  primer
tgcctgagccacatcagttc

SEQ ID NO: 101524 - DNA, 37 bp, Artificial Sequence
  primer
gtaaaacgacggccagtgaggcagcgatcaatctcac

SEQ ID NO: 101525 - DNA, 20 bp, Artificial Sequence
  primer
ctggtcaacacccagaggtc

SEQ ID NO: 101526 - DNA, 38 bp, Artificial Sequence
  primer
gtaaaacgacggccagtacccatgtcttgatttggtcc

SEQ ID NO: 101527 - DNA, 21 bp, Artificial Sequence
  primer
ctttctgagctctgagtccgc

SEQ ID NO: 101528 - DNA, 38 bp, Artificial Sequence
  primer
gtaaaacgacggccagtatcagctagggttccgcctac

SEQ ID NO: 101529 - DNA, 21 bp, Artificial Sequence
  primer
ggagcataaatgactggcctc

SEQ ID NO: 101530 - DNA, 21 bp, Artificial Sequence
  primer
gcagaagaagggcatgcttag

SEQ ID NO: 101531 - DNA, 38 bp, Artificial Sequence
  primer
gtaaaacgacggccagtatagccactttggagtgaccc

SEQ ID NO: 101532 - DNA, 38 bp, Artificial Sequence
  primer
gtaaaacgacggccagtcagcactgatttctgagccac

SEQ ID NO: 101533 - DNA, 21 bp, Artificial Sequence
  primer
agtaaatggaaagggctgctg

SEQ ID NO: 101534 - DNA, 21 bp, Artificial Sequence
  primer
gtgtaacacccgagggagatg

SEQ ID NO: 101535 - DNA, 40 bp, Artificial Sequence
  primer
gtaaaacgacggccagtgaaagccagagaaagagatccag

SEQ ID NO: 101536 - DNA, 20 bp, Artificial Sequence
  primer
ctcagtggtgaggatgggtc

SEQ ID NO: 101537 - DNA, 20 bp, Artificial Sequence
  primer
cctcacaggttcagccactg

SEQ ID NO: 101538 - DNA, 21 bp, Artificial Sequence
  primer
taacatctctgggctggaagg

SEQ ID NO: 101539 - DNA, 21 bp, Artificial Sequence
  primer
agccagagggaggagtacttg

SEQ ID NO: 101540 - DNA, 19 bp, Artificial Sequence
  primer
cctccctccagtcttccag

SEQ ID NO: 101541 - DNA, 38 bp, Artificial Sequence
  primer
gtaaaacgacggccagtcacgctagctgtaggcatgag

SEQ ID NO: 101542 - DNA, 21 bp, Artificial Sequence
  primer
tcaggtgaggtttgcacagtc

SEQ ID NO: 101543 - DNA, 38 bp, Artificial Sequence
  primer
gtaaaacgacggccagtgaatcacacaattgagcaggg

SEQ ID NO: 101544 - DNA, 21 bp, Artificial Sequence
  primer
aagtttcctttggaacagccc

SEQ ID NO: 101545 - DNA, 24 bp, Artificial Sequence
  primer
tggtatggaccctaagacagactc

SEQ ID NO: 101546 - DNA, 21 bp, Artificial Sequence
  primer
atcctgcagaactgaccttcc

SEQ ID NO: 101547 - DNA, 39 bp, Artificial Sequence
  primer
gtaaaacgacggccagtaagcattcaaacccagaaattg

SEQ ID NO: 101548 - DNA, 40 bp, Artificial Sequence
  primer
gtaaaacgacggccagtaaattcacctgcatggaatacct

SEQ ID NO: 101549 - DNA, 27 bp, Artificial Sequence
  primer
tccactaatgagtttcatgttagtctg

SEQ ID NO: 101550 - DNA, 21 bp, Artificial Sequence
  primer
atggtaatgaccctgtgatcg

SEQ ID NO: 101551 - DNA, 42 bp, Artificial Sequence
  primer
gtaaaacgacggccagttgtttctttcctgtattggcattag

SEQ ID NO: 101552 - DNA, 35 bp, Artificial Sequence; identical to SEQ ID NO: 82975
  primer

SEQ ID NO: 101553 - DNA, 23 bp, Artificial Sequence
  primer
tgaaataaagcatagcctcaggg

SEQ ID NO: 101554 - DNA, 38 bp, Artificial Sequence
  primer
gtaaaacgacggccagtaccttggaggtggttgttctg

SEQ ID NO: 101555 - DNA, 21 bp, Artificial Sequence
  primer
tacctcccaaaccaaaccaac

SEQ ID NO: 101556 - DNA, 38 bp, Artificial Sequence
  primer
gtaaaacgacggccagtcaggcagtactcccaggattc

SEQ ID NO: 101557 - DNA, 38 bp, Artificial Sequence
  primer
gtaaaacgacggccagtattagtttccacacccttggc

SEQ ID NO: 101558 - DNA, 40 bp, Artificial Sequence
  primer
gtaaaacgacggccagtactttaatgggcaatgctttctc

SEQ ID NO: 101559 - DNA, 21 bp, Artificial Sequence
  primer
cctgctcatagctgccattac

SEQ ID NO: 101560 - DNA, 36 bp, Artificial Sequence
  primer
gtaaaacgacggccagttccagcctgaacacacagc

SEQ ID NO: 101561 - DNA, 38 bp, Artificial Sequence
  primer
gtaaaacgacggccagtaatcctcagtggccatacctc

SEQ ID NO: 101562 - DNA, 38 bp, Artificial Sequence
  primer
gtaaaacgacggccagtgtccctctcccacctcatttc

SEQ ID NO: 101563 - DNA, 37 bp, Artificial Sequence
  primer
gtaaaacgacggccagtcctcaattccagatgcttgc

SEQ ID NO: 101564 - DNA, 38 bp, Artificial Sequence
  primer
gtaaaacgacggccagtgaggccaactcaagcactatg

SEQ ID NO: 101565 - DNA, 35 bp, Artificial Sequence
  primer
gtaaaacgacggccagtgaagccaggaggcagagc

SEQ ID NO: 101566 - DNA, 26 bp, Artificial Sequence
  primer
aaagaagaatgttccactaacgtagg

SEQ ID NO: 101567 - DNA, 22 bp, Artificial Sequence
  primer
aaatgcatctacccatgaaagg

SEQ ID NO: 101568 - DNA, 38 bp, Artificial Sequence
  primer
gtaaaacgacggccagtaggatctctcccagtggtcag

SEQ ID NO: 101569 - DNA, 39 bp, Artificial Sequence
  primer
gtaaaacgacggccagtcgaatacacagcctgagaaatg

SEQ ID NO: 101570 - DNA, 21 bp, Artificial Sequence
  primer
gcccatctcccttaactttcc

SEQ ID NO: 101571 - DNA, 21 bp, Artificial Sequence
  primer
ttaggagctagctggcctttg

SEQ ID NO: 101572 - DNA, 25 bp, Artificial Sequence
  primer
aaatctaaacaagcaagagagcaag

SEQ ID NO: 101573 - DNA, 21 bp, Artificial Sequence
  primer
gcaatgagggataaacccaac

SEQ ID NO: 101574 - DNA, 22 bp, Artificial Sequence
  primer
caaattcacctagcatgtcacc

SEQ ID NO: 101575 - DNA, 38 bp, Artificial Sequence
  primer
gtaaaacgacggccagtatggcagtcaactctttccag

SEQ ID NO: 101576 - DNA, 38 bp, Artificial Sequence
  primer
gtaaaacgacggccagtaattctgccttctgccaagac

SEQ ID NO: 101577 - DNA, 41 bp, Artificial Sequence
  primer
gtaaaacgacggccagtttctcccagttccttctgaactac

SEQ ID NO: 101578 - DNA, 39 bp, Artificial Sequence
  primer
gtaaaacgacggccagtctattgttcgagggattcaacc

SEQ ID NO: 101579 - DNA, 21 bp, Artificial Sequence
  primer
aagaaggtgagtcaagctggg

SEQ ID NO: 101580 - DNA, 38 bp, Artificial Sequence
  primer
gtaaaacgacggccagtctctgcttgaccgctctatcc

SEQ ID NO: 101581 - DNA, 21 bp, Artificial Sequence
  primer
caattcaacttctggctgctg

SEQ ID NO: 101582 - DNA, 22 bp, Artificial Sequence
  primer
ccctgtctaccaccacactagc

SEQ ID NO: 101583 - DNA, 21 bp, Artificial Sequence
  primer
cccacataacagaccatccac

SEQ ID NO: 101584 - DNA, 38 bp, Artificial Sequence
  primer
gtaaaacgacggccagtctgctcaatgcagatggtagg

SEQ ID NO: 101585 - DNA, 21 bp, Artificial Sequence
  primer
agcttcttcaggtcatcagcc

SEQ ID NO: 101586 - DNA, 21 bp, Artificial Sequence
  primer
caacctgccacctacattgtc

SEQ ID NO: 101587 - DNA, 38 bp, Artificial Sequence
  primer
gtaaaacgacggccagtgaaggataggtgtggtgggag

SEQ ID NO: 101588 - DNA, 21 bp, Artificial Sequence
  primer
ctggcaccggtacctatcttc

SEQ ID NO: 101589 - DNA, 38 bp, Artificial Sequence
  primer
gtaaaacgacggccagtatcaaacagagggcacgtttc

SEQ ID NO: 101590 - DNA, 22 bp, Artificial Sequence
  primer
gtaatgttcacctggtctgctg

SEQ ID NO: 101591 - DNA, 21 bp, Artificial Sequence
  primer
gtacctgtcgatggctgtgag

SEQ ID NO: 101592 - DNA, 38 bp, Artificial Sequence
  primer
gtaaaacgacggccagtcagaagcagtacgctggtgac

SEQ ID NO: 101593 - DNA, 21 bp, Artificial Sequence
  primer
aggaccagggtcttggctaac

SEQ ID NO: 101594 - DNA, 38 bp, Artificial Sequence
  primer
gtaaaacgacggccagtgaacactggctgcattgtttg

SEQ ID NO: 101595 - DNA, 38 bp, Artificial Sequence
  primer
gtaaaacgacggccagtccctggagaatggagtttgag

SEQ ID NO: 101596 - DNA, 21 bp, Artificial Sequence
  primer
gtctcccgcagtcatcttctc

SEQ ID NO: 101597 - DNA, 21 bp, Artificial Sequence
  primer
atggctatggtccacatcagg

SEQ ID NO: 101598 - DNA, 38 bp, Artificial Sequence
  primer
gtaaaacgacggccagtaggaccagggtcttggctaac

SEQ ID NO: 101599 - DNA, 21 bp, Artificial Sequence
  primer
gaacactggctgcattgtttg

SEQ ID NO: 101600 - DNA, 38 bp, Artificial Sequence; identical to SEQ ID NO: 101595
  primer

SEQ ID NO: 101601 - DNA, 21 bp, Artificial Sequence
  primer
gggtgagcagagctttgtagg

SEQ ID NO: 101602 - DNA, 21 bp, Artificial Sequence
  primer
actgggaaccaacagatgagg

SEQ ID NO: 101603 - DNA, 38 bp, Artificial Sequence
  primer
gtaaaacgacggccagtttgaccatggagttgatgagg

SEQ ID NO: 101604 - DNA, 38 bp, Artificial Sequence
  primer
gtaaaacgacggccagttgtctaggtgtctgggactgg

SEQ ID NO: 101605 - DNA, 21 bp, Artificial Sequence
  primer
taatggagctgatgcgtgatg

SEQ ID NO: 101606 - DNA, 38 bp, Artificial Sequence
  primer
gtaaaacgacggccagtagcaatataatggctcccacg

SEQ ID NO: 101607 - DNA, 38 bp, Artificial Sequence
  primer
gtaaaacgacggccagttgtagtccttcaacaggctgc

SEQ ID NO: 101608 - DNA, 21 bp, Artificial Sequence
  primer
ttgggtagtgtcaggatgcag

SEQ ID NO: 101609 - DNA, 38 bp, Artificial Sequence
  primer
gtaaaacgacggccagtggacttgatctgggctaggag

SEQ ID NO: 101610 - DNA, 37 bp, Artificial Sequence
  primer
gtaaaacgacggccagttatggacagagggcatggtg

SEQ ID NO: 101611 - DNA, 20 bp, Artificial Sequence
  primer
acatgtgcatgcatgtggac

SEQ ID NO: 101612 - DNA, 20 bp, Artificial Sequence
  primer
agctccatccattctcccag

SEQ ID NO: 101613 - DNA, 38 bp, Artificial Sequence
  primer
gtaaaacgacggccagtgacagacaggcagaagtgtgg

SEQ ID NO: 101614 - DNA, 21 bp, Artificial Sequence
  primer
gctctgtagagacaggcaggg

SEQ ID NO: 101615 - DNA, 21 bp, Artificial Sequence
  primer
ggtctttggtgggtgggttag

SEQ ID NO: 101616 - DNA, 23 bp, Artificial Sequence
  primer
acttatctgacccagatgtcgag

SEQ ID NO: 101617 - DNA, 25 bp, Artificial Sequence
  primer
tgcttataatctcagaaagaccacc

SEQ ID NO: 101618 - DNA, 38 bp, Artificial Sequence
  primer
gtaaaacgacggccagtgtccatggaatttgcagaaag

SEQ ID NO: 101619 - DNA, 22 bp, Artificial Sequence
  primer
tgatgccttcctctcactatcc

SEQ ID NO: 101620 - DNA, 40 bp, Artificial Sequence
  primer
gtaaaacgacggccagtccaagaaagaaagtgtccacaac

SEQ ID NO: 101621 - DNA, 18 bp, Artificial Sequence
  primer
cccttcaacatgcatccc

SEQ ID NO: 101622 - DNA, 19 bp, Artificial Sequence
  primer
ctagaaccttccgccatcg

SEQ ID NO: 101623 - DNA, 41 bp, Artificial Sequence
  primer
gtaaaacgacggccagttggttcaactggtaataagttcgt

SEQ ID NO: 101624 - DNA, 22 bp, Artificial Sequence
  primer
cctgctaaatttatcccaggac

SEQ ID NO: 101625 - DNA, 22 bp, Artificial Sequence
  primer
ttgttgtggcaaagattcattc

SEQ ID NO: 101626 - DNA, 27 bp, Artificial Sequence
  primer
tgtccatcttagaactacaggatcttc

SEQ ID NO: 101627 - DNA, 42 bp, Artificial Sequence
  primer
gtaaaacgacggccagtcattgactgtttagatgcttagtgc

SEQ ID NO: 101628 - DNA, 46 bp, Artificial Sequence
  primer
gtaaaacgacggccagtcaacagttaatataaggagaaccacagaa

SEQ ID NO: 101629 - DNA, 38 bp, Artificial Sequence
  primer
gtaaaacgacggccagtttcttaggcatgggaagaagc

SEQ ID NO: 101630 - DNA, 21 bp, Artificial Sequence
  primer
caagtaagaaacccaggaggc

SEQ ID NO: 101631 - DNA, 41 bp, Artificial Sequence
  primer
gtaaaacgacggccagtagatgaatcacttacctcagagca

SEQ ID NO: 101632 - DNA, 38 bp, Artificial Sequence
  primer
gtaaaacgacggccagtgcttgtgcagtaggcagtcac

SEQ ID NO: 101633 - DNA, 41 bp, Artificial Sequence
  primer
gtaaaacgacggccagttgaagagggtgatgtttaatttgg

SEQ ID NO: 101634 - DNA, 23 bp, Artificial Sequence
  primer
ctagataggccagttaggaaccc

SEQ ID NO: 101635 - DNA, 23 bp, Artificial Sequence
  primer
gaaatcttgtgtggctgtaaagg

SEQ ID NO: 101636 - DNA, 18 bp, Artificial Sequence
  primer
cggtctgggtgacagagc

SEQ ID NO: 101637 - DNA, 38 bp, Artificial Sequence
  primer
gtaaaacgacggccagttcaggcttatccctacccttg

SEQ ID NO: 101638 - DNA, 21 bp, Artificial Sequence
  primer
tgcaactgtcacagaatcagg

SEQ ID NO: 101639 - DNA, 21 bp, Artificial Sequence
  primer
atctagctgctcccacaatgc

SEQ ID NO: 101640 - DNA, 21 bp, Artificial Sequence
  primer
cggtaccattcatcttccacc

SEQ ID NO: 101641 - DNA, 38 bp, Artificial Sequence
  primer
gtaaaacgacggccagtggcttgagggtgtcccttatc

SEQ ID NO: 101642 - DNA, 22 bp, Artificial Sequence
  primer
gggtgcttctaagggtcatttc

SEQ ID NO: 101643 - DNA, 21 bp, Artificial Sequence
  primer
ctgcaagctgatcttccaatc

SEQ ID NO: 101644 - DNA, 38 bp, Artificial Sequence
  primer
gtaaaacgacggccagtgataagagccctgactctgcc

SEQ ID NO: 101645 - DNA, 37 bp, Artificial Sequence
  primer
gtaaaacgacggccagtcagtgcagtcctagggcaag

SEQ ID NO: 101646 - DNA, 21 bp, Artificial Sequence
  primer
caccctaattagcccagaggg

SEQ ID NO: 101647 - DNA, 21 bp, Artificial Sequence
  primer
cacagggtatgtgcatgtgtg

SEQ ID NO: 101648 - DNA, 37 bp, Artificial Sequence
  primer
gtaaaacgacggccagtcaactcaggcatggttgtcc

SEQ ID NO: 101649 - DNA, 22 bp, Artificial Sequence
  primer
ccaaactaggagcaatgtggac

SEQ ID NO: 101650 - DNA, 21 bp, Artificial Sequence
  primer
gatggctaaggacatcttggg

SEQ ID NO: 101651 - DNA, 36 bp, Artificial Sequence
  primer
gtaaaacgacggccagtgagatgaggcgagcaggtc

SEQ ID NO: 101652 - DNA, 21 bp, Artificial Sequence
  primer
tctttgaagctccaggctcag

SEQ ID NO: 101653 - DNA, 22 bp, Artificial Sequence
  primer
gggttggaactcagcataattg

SEQ ID NO: 101654 - DNA, 38 bp, Artificial Sequence
  primer
gtaaaacgacggccagtaggaagttatccgcgtttgag

SEQ ID NO: 101655 - DNA, 21 bp, Artificial Sequence
  primer
gctgggagatgagtagcgttc

SEQ ID NO: 101656 - DNA, 38 bp, Artificial Sequence
  primer
gtaaaacgacggccagttctgtgagttgttcccacctg

SEQ ID NO: 101657 - DNA, 38 bp, Artificial Sequence
  primer
gtaaaacgacggccagtggaaggaatgatctcagaggc

SEQ ID NO: 101658 - DNA, 38 bp, Artificial Sequence
  primer
gtaaaacgacggccagtgctgctgcttatgttcactgg

SEQ ID NO: 101659 - DNA, 21 bp, Artificial Sequence
  primer
tagagattggagttggcctgg

SEQ ID NO: 101660 - DNA, 21 bp, Artificial Sequence
  primer
aatccttgcgtgggttctatc

SEQ ID NO: 101661 - DNA, 42 bp, Artificial Sequence
  primer
gtaaaacgacggccagtgggaaggaataagaacccaattatc

SEQ ID NO: 101662 - DNA, 21 bp, Artificial Sequence
  primer
gggattctgccatgatcaata

SEQ ID NO: 101663 - DNA, 21 bp, Artificial Sequence
  primer
gcacaccagcatacacacaga

SEQ ID NO: 101664 - DNA, 40 bp, Artificial Sequence
  primer
gtaaaacgacggccagtcagatgcaataacagtacatgcg

SEQ ID NO: 101665 - DNA, 38 bp, Artificial Sequence
  primer
gtaaaacgacggccagtctgcaaattatgaagcttgcc

SEQ ID NO: 101666 - DNA, 21 bp, Artificial Sequence
  primer
gaaattcggcaggcagagtaa

SEQ ID NO: 101667 - DNA, 21 bp, Artificial Sequence
  primer
ccaacaagttgaacattggga

SEQ ID NO: 101668 - DNA, 23 bp, Artificial Sequence
  primer
gcatttgctaaacaccaagtgag

SEQ ID NO: 101669 - DNA, 38 bp, Artificial Sequence
  primer
gtaaaacgacggccagtaacccttggtcctcaattctg

SEQ ID NO: 101670 - DNA, 42 bp, Artificial Sequence
  primer
gtaaaacgacggccagtaagatctcacatgctactgaaatgc

SEQ ID NO: 101671 - DNA, 40 bp, Artificial Sequence
  primer
gtaaaacgacggccagtctcttattgcctatcaacccagc

SEQ ID NO: 101672 - DNA, 41 bp, Artificial Sequence
  primer
gtaaaacgacggccagtaacagaactgagaaccactcaacc

SEQ ID NO: 101673 - DNA, 39 bp, Artificial Sequence
  primer
gtaaaacgacggccagtagctatttgaagggcagagttg

SEQ ID NO: 101674 - DNA, 21 bp, Artificial Sequence
  primer
actacagtggctgtgtgcgtc

SEQ ID NO: 101675 - DNA, 21 bp, Artificial Sequence
  primer
atggattattgaggctgaccc

SEQ ID NO: 101676 - DNA, 38 bp, Artificial Sequence
  primer
gtaaaacgacggccagtaccactaatcccaccatcacc

SEQ ID NO: 101677 - DNA, 25 bp, Artificial Sequence
  primer
ttgcactgggaatctaactactacc

SEQ ID NO: 101678 - DNA, 21 bp, Artificial Sequence
  primer
aaatttcggccaaagacagac

SEQ ID NO: 101679 - DNA, 39 bp, Artificial Sequence
  primer
gtaaaacgacggccagtaatgacttgggttgtccatttc

SEQ ID NO: 101680 - DNA, 26 bp, Artificial Sequence
  primer
tttatggaaagcttggtatctttgtc

SEQ ID NO: 101681 - DNA, 40 bp, Artificial Sequence
  primer
gtaaaacgacggccagttggacagagggatactgattgac

SEQ ID NO: 101682 - DNA, 25 bp, Artificial Sequence
  primer
ccataggcagtgcttaaactcatag

SEQ ID NO: 101683 - DNA, 38 bp, Artificial Sequence
  primer
gtaaaacgacggccagtaaacaattcaccattctcccg

SEQ ID NO: 101684 - DNA, 22 bp, Artificial Sequence
  primer
ggattgaacatttatgcttggc

SEQ ID NO: 101685 - DNA, 39 bp, Artificial Sequence
  primer
gtaaaacgacggccagtcaggaacagcagatagtcaccc

SEQ ID NO: 101686 - DNA, 22 bp, Artificial Sequence
  primer
tcatatcatgtttgccgtgatg

SEQ ID NO: 101687 - DNA, 40 bp, Artificial Sequence
  primer
gtaaaacgacggccagtaaggagcaggaattaaccaagag

SEQ ID NO: 101688 - DNA, 21 bp, Artificial Sequence
  primer
gttactggatgtgttcggtgc

SEQ ID NO: 101689 - DNA, 21 bp, Artificial Sequence
  primer
cgaggtttaggaaacactgcc

SEQ ID NO: 101690 - DNA, 22 bp, Artificial Sequence
  primer
aagagcagcaagaattcaaacg

SEQ ID NO: 101691 - DNA, 38 bp, Artificial Sequence
  primer
gtaaaacgacggccagtgccattagctacgtgagaggg

SEQ ID NO: 101692 - DNA, 24 bp, Artificial Sequence
  primer
tcttctcaaatcaggtatgccttc

SEQ ID NO: 101693 - DNA, 21 bp, Artificial Sequence
  primer
aaaccaatgcctcttagtggg

SEQ ID NO: 101694 - DNA, 19 bp, Artificial Sequence
  primer
atgatcattgggaggtggg

SEQ ID NO: 101695 - DNA, 38 bp, Artificial Sequence
  primer
gtaaaacgacggccagtagggtaggagagcatcaccag

SEQ ID NO: 101696 - DNA, 21 bp, Artificial Sequence
  primer
tttcaagccctgactcatctg

SEQ ID NO: 101697 - DNA, 38 bp, Artificial Sequence
  primer
gtaaaacgacggccagttcagtgcattgcagagtttcc

SEQ ID NO: 101698 - DNA, 21 bp, Artificial Sequence
  primer
ttaagggttgctgcctttctc

SEQ ID NO: 101699 - DNA, 44 bp, Artificial Sequence
  primer
gtaaaacgacggccagttcactctctcctactggaatagtcttg

SEQ ID NO: 101700 - DNA, 38 bp, Artificial Sequence
  primer
gtaaaacgacggccagtccatttcgaagccatcttagg

SEQ ID NO: 101701 - DNA, 19 bp, Artificial Sequence
  primer
gaggctgaggcaggagaat

SEQ ID NO: 101702 - DNA, 21 bp, Artificial Sequence
  primer
tttcacctgaaatgttctccc

SEQ ID NO: 101703 - DNA, 22 bp, Artificial Sequence
  primer
tcaaccatggatcatcaatttc

SEQ ID NO: 101704 - DNA, 19 bp, Artificial Sequence
  primer
ccaccatggaacaactggg

SEQ ID NO: 101705 - DNA, 22 bp, Artificial Sequence
  primer
tgacatgatgccttaccatacg

SEQ ID NO: 101706 - DNA, 40 bp, Artificial Sequence
  primer
gtaaaacgacggccagtaaagaagcctagtttgtcctgtg

SEQ ID NO: 101707 - DNA, 25 bp, Artificial Sequence
  primer
gttatgggacgaactatacacaaca

SEQ ID NO: 101708 - DNA, 22 bp, Artificial Sequence
  primer
tgcatagtttgtgtgtgtcacc

SEQ ID NO: 101709 - DNA, 38 bp, Artificial Sequence
  primer
gtaaaacgacggccagttgccaataagaggttccttca

SEQ ID NO: 101710 - DNA, 25 bp, Artificial Sequence
  primer
gctaagcaaggtcttacatttgatt

SEQ ID NO: 101711 - DNA, 21 bp, Artificial Sequence
  primer
tgatgtgctcaaagtccatgc

SEQ ID NO: 101712 - DNA, 27 bp, Artificial Sequence
  primer
gaaataacaaagagatttcagaatcca

SEQ ID NO: 101713 - DNA, 21 bp, Artificial Sequence
  primer
aaagcaagcaatggagcaatc

SEQ ID NO: 101714 - DNA, 38 bp, Artificial Sequence
  primer
gtaaaacgacggccagtgcagtggttcattccttcctc

SEQ ID NO: 101715 - DNA, 44 bp, Artificial Sequence
  primer
gtaaaacgacggccagtttctaatatgtgtacaaaggtgtctga

SEQ ID NO: 101716 - DNA, 22 bp, Artificial Sequence
  primer
tgagcaacataacacatcccag

SEQ ID NO: 101717 - DNA, 38 bp, Artificial Sequence
  primer
gtaaaacgacggccagtctcacgtggctttgagaaatg

SEQ ID NO: 101718 - DNA, 22 bp, Artificial Sequence
  primer
tgactgccttggcttctctatc

SEQ ID NO: 101719 - DNA, 39 bp, Artificial Sequence
  primer
gtaaaacgacggccagtcagagaggagaaatccctcaaa

SEQ ID NO: 101720 - DNA, 40 bp, Artificial Sequence
  primer
gtaaaacgacggccagtccctaacctcctgtaagttcacc

SEQ ID NO: 101721 - DNA, 26 bp, Artificial Sequence
  primer
tccctgtctgagtcatagaagttacc

SEQ ID NO: 101722 - DNA, 39 bp, Artificial Sequence
  primer
gtaaaacgacggccagtcccgtagagaaattccttgagc

SEQ ID NO: 101723 - DNA, 43 bp, Artificial Sequence
  primer
gtaaaacgacggccagtgcaggtttctattatacccaagaatc

SEQ ID NO: 101724 - DNA, 21 bp, Artificial Sequence
  primer
acatatttgctgtgtggctgc

SEQ ID NO: 101725 - DNA, 23 bp, Artificial Sequence
  primer
gaaagctttacgaatcttcccag

SEQ ID NO: 101726 - DNA, 21 bp, Artificial Sequence
  primer
tcagaaagttccactgttgcc

SEQ ID NO: 101727 - DNA, 21 bp, Artificial Sequence
  primer
atgccttccttatttctcccg

SEQ ID NO: 101728 - DNA, 39 bp, Artificial Sequence
  primer
gtaaaacgacggccagttgcatcctttcctggaacatac

SEQ ID NO: 101729 - DNA, 23 bp, Artificial Sequence
  primer
tttgatgggacagcaatttctaa

SEQ ID NO: 101730 - DNA, 38 bp, Artificial Sequence
  primer
gtaaaacgacggccagtaagaatgctggcgtctctagg

SEQ ID NO: 101731 - DNA, 40 bp, Artificial Sequence
  primer
gtaaaacgacggccagtcaggtttgacaccataacacaag

SEQ ID NO: 101732 - DNA, 39 bp, Artificial Sequence
  primer
gtaaaacgacggccagttccatgcaaataaagatggaga

SEQ ID NO: 101733 - DNA, 22 bp, Artificial Sequence
  primer
ttccataacatggtgtggtttc

SEQ ID NO: 101734 - DNA, 38 bp, Artificial Sequence
  primer
gtaaaacgacggccagtcactaaggcacctaggttggg

SEQ ID NO: 101735 - DNA, 38 bp, Artificial Sequence
  primer
gtaaaacgacggccagttgagagccactcgtttactgc

SEQ ID NO: 101736 - DNA, 21 bp, Artificial Sequence
  primer
caatgcctaattcatcaagcg

SEQ ID NO: 101737 - DNA, 37 bp, Artificial Sequence
  primer
gtaaaacgacggccagtgggccagttgaggttctacc

SEQ ID NO: 101738 - DNA, 21 bp, Artificial Sequence
  primer
gaggacaagaaacatcccagg

SEQ ID NO: 101739 - DNA, 39 bp, Artificial Sequence
  primer
gtaaaacgacggccagttgaaatgaacatcaagcaaagg

SEQ ID NO: 101740 - DNA, 41 bp, Artificial Sequence
  primer
gtaaaacgacggccagtccctaatacattactggaccttgg

SEQ ID NO: 101741 - DNA, 38 bp, Artificial Sequence
  primer
gtaaaacgacggccagtctggaaggtttcatggagctg

SEQ ID NO: 101742 - DNA, 21 bp, Artificial Sequence
  primer
gaacgcatcttgtgtcagagg

SEQ ID NO: 101743 - DNA, 21 bp, Artificial Sequence
  primer
cttcatcctcttcccagagcc

SEQ ID NO: 101744 - DNA, 21 bp, Artificial Sequence
  primer
cacccgcttatgcctatagaa

SEQ ID NO: 101745 - DNA, 20 bp, Artificial Sequence
  primer
gtcactgctccttgtccgag

SEQ ID NO: 101746 - DNA, 38 bp, Artificial Sequence
  primer
gtaaaacgacggccagttagagtatgtcggcctctgcg

SEQ ID NO: 101747 - DNA, 21 bp, Artificial Sequence
  primer
gaagtggaagaccaggctgag

SEQ ID NO: 101748 - DNA, 22 bp, Artificial Sequence
  primer
aaagagaaagggagagaccgac

SEQ ID NO: 101749 - DNA, 38 bp, Artificial Sequence
  primer
gtaaaacgacggccagtcaatatctcttcccgctccac

SEQ ID NO: 101750 - DNA, 21 bp, Artificial Sequence
  primer
tccaggcctacaactttcctg

SEQ ID NO: 101751 - DNA, 38 bp, Artificial Sequence
  primer
gtaaaacgacggccagttgtagatggcaatgaccttcc

SEQ ID NO: 101752 - DNA, 21 bp, Artificial Sequence
  primer
aaagaggccattcctactggg

SEQ ID NO: 101753 - DNA, 21 bp, Artificial Sequence
  primer
ctctagcagcctgatgatccc

SEQ ID NO: 101754 - DNA, 38 bp, Artificial Sequence
  primer
gtaaaacgacggccagtaattcctcagtatgcccttcc

SEQ ID NO: 101755 - DNA, 21 bp, Artificial Sequence
  primer
ccctccttgaatcttccaacc

SEQ ID NO: 101756 - DNA, 21 bp, Artificial Sequence
  primer
aaaggtcagcagtcccttgtc

SEQ ID NO: 101757 - DNA, 22 bp, Artificial Sequence
  primer
ccagctagagaccaccagtgac

SEQ ID NO: 101758 - DNA, 21 bp, Artificial Sequence
  primer
gtatctcaacccttcccatgc

SEQ ID NO: 101759 - DNA, 21 bp, Artificial Sequence
  primer
actggcacctaagacaggagg

SEQ ID NO: 101760 - DNA, 20 bp, Artificial Sequence
  primer
ctatttccttccctgccctc

SEQ ID NO: 101761 - DNA, 38 bp, Artificial Sequence
  primer
gtaaaacgacggccagtacgtgggtccttgtatttgtg

SEQ ID NO: 101762 - DNA, 20 bp, Artificial Sequence
  primer
ccttggagctattgtgaggg

SEQ ID NO: 101763 - DNA, 20 bp, Artificial Sequence
  primer
gtttcccactcatccttccc

SEQ ID NO: 101764 - DNA, 39 bp, Artificial Sequence
  primer
gtaaaacgacggccagttgcctcctccatgttaagaatc

SEQ ID NO: 101765 - DNA, 21 bp, Artificial Sequence
  primer
catctagtgcctttgccatcc

SEQ ID NO: 101766 - DNA, 38 bp, Artificial Sequence
  primer
gtaaaacgacggccagtggagccaaatgtccctgatag

SEQ ID NO: 101767 - DNA, 38 bp, Artificial Sequence
  primer
gtaaaacgacggccagtcagcggagacacaaacacatc

SEQ ID NO: 101768 - DNA, 21 bp, Artificial Sequence
  primer
tgatttctggtgtctgccaac

SEQ ID NO: 101769 - DNA, 27 bp, Artificial Sequence
  primer
caatgatgaataaatagtttcccaatg

SEQ ID NO: 101770 - DNA, 27 bp, Artificial Sequence
  primer
aggtagtttattgtcagagaaagcaag

SEQ ID NO: 101771 - DNA, 38 bp, Artificial Sequence
  primer
gtaaaacgacggccagttccttgctgtaggccaaagac

SEQ ID NO: 101772 - DNA, 44 bp, Artificial Sequence
  primer
gtaaaacgacggccagtgcatggttcctctcttcaaattattac

SEQ ID NO: 101773 - DNA, 21 bp, Artificial Sequence
  primer
tttgcccaaacacaaatatga

SEQ ID NO: 101774 - DNA, 20 bp, Artificial Sequence
  primer
cctgagcgtgtaacaccagc

SEQ ID NO: 101775 - DNA, 23 bp, Artificial Sequence
  primer
ttaggccagaagaatatggtgac

SEQ ID NO: 101776 - DNA, 21 bp, Artificial Sequence
  primer
ttgggatgtttcactggtctc

SEQ ID NO: 101777 - DNA, 38 bp, Artificial Sequence
  primer
gtaaaacgacggccagtagcttcaaagcacagctcaag

SEQ ID NO: 101778 - DNA, 22 bp, Artificial Sequence
  primer
caaagaaacaaaccattggtgg

SEQ ID NO: 101779 - DNA, 23 bp, Artificial Sequence
  primer
ccacacctgttggattctttagg

SEQ ID NO: 101780 - DNA, 22 bp, Artificial Sequence
  primer
tgtcagttgggttagttccaga

SEQ ID NO: 101781 - DNA, 38 bp, Artificial Sequence
  primer
gtaaaacgacggccagtgagagcaagtctgattgcagg

SEQ ID NO: 101782 - DNA, 38 bp, Artificial Sequence
  primer
gtaaaacgacggccagtgaacaaaggaaaccttccacg

SEQ ID NO: 101783 - DNA, 22 bp, Artificial Sequence
  primer
ggagactacaagaggccaacac

SEQ ID NO: 101784 - DNA, 22 bp, Artificial Sequence
  primer
ttctgcaccatacacagagctt

SEQ ID NO: 101785 - DNA, 40 bp, Artificial Sequence
  primer
gtaaaacgacggccagttgatattcatggagagaaatggg

SEQ ID NO: 101786 - DNA, 38 bp, Artificial Sequence
  primer
gtaaaacgacggccagtcaatggccaagcattataggg

SEQ ID NO: 101787 - DNA, 38 bp, Artificial Sequence
  primer
gtaaaacgacggccagtgaagatattcgtgactggccc

SEQ ID NO: 101788 - DNA, 39 bp, Artificial Sequence
  primer
gtaaaacgacggccagtgccctttcttaatcctccaatg

SEQ ID NO: 101789 - DNA, 20 bp, Artificial Sequence
  primer
acagaggtgagccactgtgc

SEQ ID NO: 101790 - DNA, 21 bp, Artificial Sequence
  primer
tatattccattgcctgcctcc

SEQ ID NO: 101791 - DNA, 23 bp, Artificial Sequence
  primer
actttgcacttactgtcccagag

SEQ ID NO: 101792 - DNA, 38 bp, Artificial Sequence
  primer
gtaaaacgacggccagtccgggacagacataccatacc

SEQ ID NO: 101793 - DNA, 20 bp, Artificial Sequence
  primer
ccaacctgggagacaagagg

SEQ ID NO: 101794 - DNA, 21 bp, Artificial Sequence
  primer
gagcatctcactgcctcactc

SEQ ID NO: 101795 - DNA, 44 bp, Artificial Sequence
  primer
gtaaaacgacggccagttcaacttggtttaaatttgactagaga

SEQ ID NO: 101796 - DNA, 38 bp, Artificial Sequence
  primer
gtaaaacgacggccagtttcaatcctatgcgtaccacg

SEQ ID NO: 101797 - DNA, 22 bp, Artificial Sequence
  primer
caacccaggcaaacaagaaata

SEQ ID NO: 101798 - DNA, 20 bp, Artificial Sequence
  primer
tttctccctcaaacgcatct

SEQ ID NO: 101799 - DNA, 44 bp, Artificial Sequence
  primer
gtaaaacgacggccagtagcttgcttgaacatactttagttacc

SEQ ID NO: 101800 - DNA, 21 bp, Artificial Sequence
  primer
tgccactattctctttctggc

SEQ ID NO: 101801 - DNA, 21 bp, Artificial Sequence
  primer
aagcagtagttgttgttggca

SEQ ID NO: 101802 - DNA, 21 bp, Artificial Sequence
  primer
agcattgaacagatgctaggg

SEQ ID NO: 101803 - DNA, 21 bp, Artificial Sequence
  primer
cataaccattaaggcaggcac

SEQ ID NO: 101804 - DNA, 21 bp, Artificial Sequence
  primer
ctggccatatttggcttcttc

SEQ ID NO: 101805 - DNA, 21 bp, Artificial Sequence
  primer
tgcacatctcacaggtagcac

SEQ ID NO: 101806 - DNA, 22 bp, Artificial Sequence
  primer
aaagaaggatgacagagacgga

SEQ ID NO: 101807 - DNA, 38 bp, Artificial Sequence
  primer
gtaaaacgacggccagttcacgatgatagagacagcca

SEQ ID NO: 101808 - DNA, 21 bp, Artificial Sequence
  primer
tctgtctgaagcaaccagtgc

SEQ ID NO: 101809 - DNA, 22 bp, Artificial Sequence
  primer
tccctttcacattccagaacag

SEQ ID NO: 101810 - DNA, 41 bp, Artificial Sequence
  primer
gtaaaacgacggccagtaagagattggtaaacaagatgcag

SEQ ID NO: 101811 - DNA, 23 bp, Artificial Sequence
  primer
tccatctatcaagtgcttccatc

SEQ ID NO: 101812 - DNA, 40 bp, Artificial Sequence
  primer
gtaaaacgacggccagttgtacaagcccttgaatctgaaa

SEQ ID NO: 101813 - DNA, 37 bp, Artificial Sequence
  primer
gtaaaacgacggccagtcttgggaaatgcttcacctg

SEQ ID NO: 101814 - DNA, 38 bp, Artificial Sequence
  primer
gtaaaacgacggccagtccatgtcaaatgggaacctaa

SEQ ID NO: 101815 - DNA, 25 bp, Artificial Sequence
  primer
ggaatcaagttcctctaaggaagag

SEQ ID NO: 101816 - DNA, 18 bp, Artificial Sequence
  primer
gacttcgccaagacacgg

SEQ ID NO: 101817 - DNA, 41 bp, Artificial Sequence
  primer
gtaaaacgacggccagtttcatttcctgtggaacagataag

SEQ ID NO: 101818 - DNA, 21 bp, Artificial Sequence
  primer
tggattaaccactggatgctg

SEQ ID NO: 101819 - DNA, 39 bp, Artificial Sequence
  primer
gtaaaacgacggccagtgcaaattacgtcaacattctgc

SEQ ID NO: 101820 - DNA, 38 bp, Artificial Sequence
  primer
gtaaaacgacggccagttggctagacaccaccactttg

SEQ ID NO: 101821 - DNA, 24 bp, Artificial Sequence
  primer
gcactaacttgttcagtatctggc

SEQ ID NO: 101822 - DNA, 21 bp, Artificial Sequence
  primer
tgagtatcacatggcctgacc

SEQ ID NO: 101823 - DNA, 38 bp, Artificial Sequence
  primer
gtaaaacgacggccagtttatgcagagttctggagggc

SEQ ID NO: 101824 - DNA, 21 bp, Artificial Sequence
  primer
ctaggcactacactggcatgg

SEQ ID NO: 101825 - DNA, 37 bp, Artificial Sequence
  primer
gtaaaacgacggccagtatgcattgcctatttctgcc

SEQ ID NO: 101826 - DNA, 42 bp, Artificial Sequence
  primer
gtaaaacgacggccagtcacattagccaactctttaatctgg

SEQ ID NO: 101827 - DNA, 22 bp, Artificial Sequence
  primer
ttgatcattcagcacacaggac

SEQ ID NO: 101828 - DNA, 38 bp, Artificial Sequence
  primer
gtaaaacgacggccagttggtggatgcaagtatgttcc

SEQ ID NO: 101829 - DNA, 21 bp, Artificial Sequence
  primer
ggatggttggagtgatggaac

SEQ ID NO: 101830 - DNA, 38 bp, Artificial Sequence
  primer
gtaaaacgacggccagtgagtgctcactctccttcacc

SEQ ID NO: 101831 - DNA, 42 bp, Artificial Sequence
  primer
gtaaaacgacggccagtggcactcaccagttattaaactacc

SEQ ID NO: 101832 - DNA, 22 bp, Artificial Sequence
  primer
tgagcctttatcacaccatcac

SEQ ID NO: 101833 - DNA, 21 bp, Artificial Sequence
  primer
ttgtgctccagtgacttccac

SEQ ID NO: 101834 - DNA, 38 bp, Artificial Sequence
  primer
gtaaaacgacggccagtcccaccacttctctcagttgg

SEQ ID NO: 101835 - DNA, 19 bp, Artificial Sequence
  primer
atgggctggtgaaagcaag

SEQ ID NO: 101836 - DNA, 38 bp, Artificial Sequence
  primer
gtaaaacgacggccagttactgggctaacccatatccc

SEQ ID NO: 101837 - DNA, 39 bp, Artificial Sequence
  primer
gtaaaacgacggccagtccaaaccagaaccatcatagtg

SEQ ID NO: 101838 - DNA, 38 bp, Artificial Sequence
  primer
gtaaaacgacggccagttaatgtggctaatgtcggtgg

SEQ ID NO: 101839 - DNA, 23 bp, Artificial Sequence
  primer
cccatgctaaatacatcctgaag

SEQ ID NO: 101840 - DNA, 22 bp, Artificial Sequence
  primer
caccagaataccatttcctccc

SEQ ID NO: 101841 - DNA, 24 bp, Artificial Sequence
  primer
tctctcgagtgcacagtgactaac

SEQ ID NO: 101842 - DNA, 20 bp, Artificial Sequence
  primer
ccatgtccttctgtcttggg

SEQ ID NO: 101843 - DNA, 21 bp, Artificial Sequence
  primer
ttcaagactagggcacactgc

SEQ ID NO: 101844 - DNA, 21 bp, Artificial Sequence
  primer
aatttgctggtacaaatgccc

SEQ ID NO: 101845 - DNA, 21 bp, Artificial Sequence
  primer
ctcgatgtagccaatgaagcc

SEQ ID NO: 101846 - DNA, 21 bp, Artificial Sequence
  primer
gcccttcataaggtgaattgg

SEQ ID NO: 101847 - DNA, 39 bp, Artificial Sequence
  primer
gtaaaacgacggccagtggaagggaagaattctgtttgg

SEQ ID NO: 101848 - DNA, 21 bp, Artificial Sequence
  primer
gagaaaggtgctcttggttcg

SEQ ID NO: 101849 - DNA, 21 bp, Artificial Sequence
  primer
cttgatctcggcataagggtc

SEQ ID NO: 101850 - DNA, 21 bp, Artificial Sequence
  primer
agttcctccttgcttcttccc

SEQ ID NO: 101851 - DNA, 38 bp, Artificial Sequence
  primer
gtaaaacgacggccagttaggtgaaagggaacccacag

SEQ ID NO: 101852 - DNA, 21 bp, Artificial Sequence
  primer
ctgcctaggaccttcctgttg

SEQ ID NO: 101853 - DNA, 21 bp, Artificial Sequence
  primer
ccagaccagagaggtccactg

SEQ ID NO: 101854 - DNA, 38 bp, Artificial Sequence
  primer
gtaaaacgacggccagtacagtcccagggtgaacagac

SEQ ID NO: 101855 - DNA, 38 bp, Artificial Sequence
  primer
gtaaaacgacggccagtcaatgcgtcttacagcctgag

SEQ ID NO: 101856 - DNA, 37 bp, Artificial Sequence
  primer
gtaaaacgacggccagtatgttgggaggaagagaggg

SEQ ID NO: 101857 - DNA, 38 bp, Artificial Sequence
  primer
gtaaaacgacggccagtgtatagcttggacctctgggc

SEQ ID NO: 101858 - DNA, 21 bp, Artificial Sequence
  primer
aaagtacacagcacgcaccac

SEQ ID NO: 101859 - DNA, 38 bp, Artificial Sequence
  primer
gtaaaacgacggccagttcaattagcataagcccaccc

SEQ ID NO: 101860 - DNA, 38 bp, Artificial Sequence
  primer
gtaaaacgacggccagtatgaaagtagcagcctcagcc

SEQ ID NO: 101861 - DNA, 37 bp, Artificial Sequence
  primer
gtaaaacgacggccagtatctctccctggcgctactg

SEQ ID NO: 101862 - DNA, 38 bp, Artificial Sequence
  primer
gtaaaacgacggccagtgttccaggacaggttgaatgc

SEQ ID NO: 101863 - DNA, 21 bp, Artificial Sequence
  primer
aacactccagtcgctacagcc

SEQ ID NO: 101864 - DNA, 21 bp, Artificial Sequence
  primer
tccagcccttctttctttagc

SEQ ID NO: 101865 - DNA, 21 bp, Artificial Sequence
  primer
ggttgtgatagcacgtgttgg

SEQ ID NO: 101866 - DNA, 22 bp, Artificial Sequence
  primer
ccagactttcaccaaactgacc

SEQ ID NO: 101867 - DNA, 38 bp, Artificial Sequence
  primer
gtaaaacgacggccagtcggttgggaattcactctctc

SEQ ID NO: 101868 - DNA, 38 bp, Artificial Sequence
  primer
gtaaaacgacggccagtacagggaaatgatcctgatgc

SEQ ID NO: 101869 - DNA, 38 bp, Artificial Sequence
  primer
gtaaaacgacggccagtctgcttggagtctgctctctg

SEQ ID NO: 101870 - DNA, 21 bp, Artificial Sequence
  primer
ccttgtgtctctgagtgtggg

SEQ ID NO: 101871 - DNA, 38 bp, Artificial Sequence
  primer
gtaaaacgacggccagtcacagaaacacgatccctctg

SEQ ID NO: 101872 - DNA, 38 bp, Artificial Sequence
  primer
gtaaaacgacggccagtgtgtcagatgtgtgtggaggg

SEQ ID NO: 101873 - DNA, 38 bp, Artificial Sequence
  primer
gtaaaacgacggccagtcttgcgtagtctgtccttccc

SEQ ID NO: 101874 - DNA, 21 bp, Artificial Sequence
  primer
atctggaggcagtatgatggg

SEQ ID NO: 101875 - DNA, 36 bp, Artificial Sequence
  primer
gtaaaacgacggccagtccaagtgcctcggaagaag

SEQ ID NO: 101876 - DNA, 20 bp, Artificial Sequence
  primer
gtgtccctggatctacgctg

SEQ ID NO: 101877 - DNA, 39 bp, Artificial Sequence
  primer
gtaaaacgacggccagtcgacacagcatcttctcctttc

SEQ ID NO: 101878 - DNA, 21 bp, Artificial Sequence
  primer
agttgggcggtgcttatttac

SEQ ID NO: 101879 - DNA, 38 bp, Artificial Sequence
  primer
gtaaaacgacggccagttaaacggcagcaaagtgagac

SEQ ID NO: 101880 - DNA, 38 bp, Artificial Sequence
  primer
gtaaaacgacggccagtgggaaatgaggccaaagaatc

SEQ ID NO: 101881 - DNA, 26 bp, Artificial Sequence
  primer
aaaccaaagggctgactatatttatg

SEQ ID NO: 101882 - DNA, 38 bp, Artificial Sequence
  primer
gtaaaacgacggccagttcctaggttcaccacttaccg

SEQ ID NO: 101883 - DNA, 22 bp, Artificial Sequence
  primer
tgcacacattcttcaactttgg

SEQ ID NO: 101884 - DNA, 41 bp, Artificial Sequence
  primer
gtaaaacgacggccagtttgtcaatcctatctacaggaggc

SEQ ID NO: 101885 - DNA, 21 bp, Artificial Sequence
  primer
tttctgattgccagtctttcg

SEQ ID NO: 101886 - DNA, 21 bp, Artificial Sequence
  primer
gagctgtgccagtgtctcttg

SEQ ID NO: 101887 - DNA, 38 bp, Artificial Sequence
  primer
gtaaaacgacggccagtaaggcagcatatccctttctg

SEQ ID NO: 101888 - DNA, 20 bp, Artificial Sequence
  primer
acaccaagctgtgggatgtc

SEQ ID NO: 101889 - DNA, 40 bp, Artificial Sequence
  primer
gtaaaacgacggccagtaacatcaacatgcttgttaaccc

SEQ ID NO: 101890 - DNA, 41 bp, Artificial Sequence
  primer
gtaaaacgacggccagtcacagaagagtaactttgggaacc

SEQ ID NO: 101891 - DNA, 23 bp, Artificial Sequence
  primer
gcagcatattcaactcttaaggc

SEQ ID NO: 101892 - DNA, 21 bp, Artificial Sequence
  primer
acagctaccaggacaagcctc

SEQ ID NO: 101893 - DNA, 21 bp, Artificial Sequence
  primer
gtgctaaggttcggtctccac

SEQ ID NO: 101894 - DNA, 20 bp, Artificial Sequence
  primer
gatcattcacagggcagcag

SEQ ID NO: 101895 - DNA, 37 bp, Artificial Sequence
  primer
gtaaaacgacggccagtctaccttcaggagggcagtg

SEQ ID NO: 101896 - DNA, 21 bp, Artificial Sequence
  primer
gaataaacgcctgctacccac

SEQ ID NO: 101897 - DNA, 37 bp, Artificial Sequence
  primer
gtaaaacgacggccagtgaagcacacgcctctacctg

SEQ ID NO: 101898 - DNA, 20 bp, Artificial Sequence
  primer
caggaaggaagctttgggac

SEQ ID NO: 101899 - DNA, 20 bp, Artificial Sequence
  primer
tggtgatgtgcaggacgtag

SEQ ID NO: 101900 - DNA, 21 bp, Artificial Sequence
  primer
caaagctagcaaagttggagg

SEQ ID NO: 101901 - DNA, 19 bp, Artificial Sequence
  primer
acagcagccacctctcagg

SEQ ID NO: 101902 - DNA, 21 bp, Artificial Sequence
  primer
aaagctccttcactgcctctc

SEQ ID NO: 101903 - DNA, 19 bp, Artificial Sequence
  primer
ccctgtacatccaggtccg

SEQ ID NO: 101904 - DNA, 38 bp, Artificial Sequence
  primer
gtaaaacgacggccagtgacacacacctgcgaagagag

SEQ ID NO: 101905 - DNA, 37 bp, Artificial Sequence
  primer
gtaaaacgacggccagttgggagaaacaggtgagcag

SEQ ID NO: 101906 - DNA, 21 bp, Artificial Sequence
  primer
gatccagatgggtaaagcagg

SEQ ID NO: 101907 - DNA, 22 bp, Artificial Sequence
  primer
tccatcaaggttaaagaggctg

SEQ ID NO: 101908 - DNA, 38 bp, Artificial Sequence; identical to SEQ ID NO: 747
  primer

SEQ ID NO: 101909 - DNA, 38 bp, Artificial Sequence
  primer
gtaaaacgacggccagtacaatctgcgaacaaccaaac

SEQ ID NO: 101910 - DNA, 19 bp, Artificial Sequence
  primer
acccacttggcctccaaag

SEQ ID NO: 101911 - DNA, 38 bp, Artificial Sequence
  primer
gtaaaacgacggccagtccaggaggatttcacatctgc

SEQ ID NO: 101912 - DNA, 38 bp, Artificial Sequence
  primer
gtaaaacgacggccagtggcagtcagcactgcacttag

SEQ ID NO: 101913 - DNA, 22 bp, Artificial Sequence
  primer
gaaacaaattcaagcatgaggc

SEQ ID NO: 101914 - DNA, 21 bp, Artificial Sequence
  primer
gggccttggacatcatcatag

SEQ ID NO: 101915 - DNA, 38 bp, Artificial Sequence
  primer
gtaaaacgacggccagtgggtaaagccacaggtgtttg

SEQ ID NO: 101916 - DNA, 21 bp, Artificial Sequence
  primer
tttgcctaaatggctgttgac

SEQ ID NO: 101917 - DNA, 20 bp, Artificial Sequence
  primer
gggtctgggactgacagagg

SEQ ID NO: 101918 - DNA, 20 bp, Artificial Sequence
  primer
agacaaacgccataaacccg

SEQ ID NO: 101919 - DNA, 36 bp, Artificial Sequence
  primer
gtaaaacgacggccagtcttcagtctcccgcagctc

SEQ ID NO: 101920 - DNA, 38 bp, Artificial Sequence
  primer
gtaaaacgacggccagttctaccactcaactgtggcct

SEQ ID NO: 101921 - DNA, 20 bp, Artificial Sequence
  primer
ctcgctgacccttgtaatgc

SEQ ID NO: 101922 - DNA, 21 bp, Artificial Sequence
  primer
gatcaagtgacagaggcctgg

SEQ ID NO: 101923 - DNA, 21 bp, Artificial Sequence
  primer
gtcaaaggcagaactcttggc

SEQ ID NO: 101924 - DNA, 21 bp, Artificial Sequence
  primer
cacttggcctgtgtaggaatg

SEQ ID NO: 101925 - DNA, 41 bp, Artificial Sequence
  primer
gtaaaacgacggccagtttctggcagagataaagttaaccg

SEQ ID NO: 101926 - DNA, 22 bp, Artificial Sequence
  primer
cagtctgccatttacttagccc

SEQ ID NO: 101927 - DNA, 38 bp, Artificial Sequence
  primer
gtaaaacgacggccagttgatgtgaactgctcaaaccc

SEQ ID NO: 101928 - DNA, 38 bp, Artificial Sequence
  primer
gtaaaacgacggccagtataacaggctgactctggtgg

SEQ ID NO: 101929 - DNA, 40 bp, Artificial Sequence
  primer
gtaaaacgacggccagtcatcctggagtattacgtgcttg

SEQ ID NO: 101930 - DNA, 37 bp, Artificial Sequence
  primer
gtaaaacgacggccagtggactataggcacctgccac

SEQ ID NO: 101931 - DNA, 36 bp, Artificial Sequence
  primer
gtaaaacgacggccagtagctgatcatgggtggctc

SEQ ID NO: 101932 - DNA, 38 bp, Artificial Sequence
  primer
gtaaaacgacggccagtaactggaaagattggtgtggc

SEQ ID NO: 101933 - DNA, 21 bp, Artificial Sequence
  primer
tcaggcctttccatgtaacac

SEQ ID NO: 101934 - DNA, 25 bp, Artificial Sequence
  primer
ttagggatctcttcaaatttctgtg

SEQ ID NO: 101935 - DNA, 44 bp, Artificial Sequence
  primer
gtaaaacgacggccagtcaacaacctaacagattaaaggaattt

SEQ ID NO: 101936 - DNA, 38 bp, Artificial Sequence
  primer
gtaaaacgacggccagtccatatgcctgaaagtgcttg

SEQ ID NO: 101937 - DNA, 39 bp, Artificial Sequence
  primer
gtaaaacgacggccagtcactctgctttgcttgagctac

SEQ ID NO: 101938 - DNA, 21 bp, Artificial Sequence
  primer
gtgacacttaggaagctggcg

SEQ ID NO: 101939 - DNA, 41 bp, Artificial Sequence
  primer
gtaaaacgacggccagttcttcttatcttcctcacacccag

SEQ ID NO: 101940 - DNA, 38 bp, Artificial Sequence
  primer
gtaaaacgacggccagtagacagtcatcgtccatcgtg

SEQ ID NO: 101941 - DNA, 28 bp, Artificial Sequence
  primer
tttaataaaccacagaaccaagactaag

SEQ ID NO: 101942 - DNA, 21 bp, Artificial Sequence
  primer
tgaggcaacatccttaactgg

SEQ ID NO: 101943 - DNA, 38 bp, Artificial Sequence
  primer
gtaaaacgacggccagttgcaatccagatgacttggtg

SEQ ID NO: 101944 - DNA, 38 bp, Artificial Sequence
  primer
gtaaaacgacggccagtgctggagacaatcttgggaag

SEQ ID NO: 101945 - DNA, 37 bp, Artificial Sequence
  primer
gtaaaacgacggccagtgtaaggcccagtggtgtttg

SEQ ID NO: 101946 - DNA, 37 bp, Artificial Sequence
  primer
gtaaaacgacggccagttaatcatcatgctcaggccc

SEQ ID NO: 101947 - DNA, 20 bp, Artificial Sequence
  primer
ttccttccttcctctttggc

SEQ ID NO: 101948 - DNA, 38 bp, Artificial Sequence
  primer
gtaaaacgacggccagtctgccttatccatacgcagtg

SEQ ID NO: 101949 - DNA, 37 bp, Artificial Sequence
  primer
gtaaaacgacggccagtacagcatctctgggatcacg

SEQ ID NO: 101950 - DNA, 38 bp, Artificial Sequence
  primer
gtaaaacgacggccagtgcacttctttgctacagacgg

SEQ ID NO: 101951 - DNA, 38 bp, Artificial Sequence
  primer
gtaaaacgacggccagttatcctgggcagaggctagtg

SEQ ID NO: 101952 - DNA, 39 bp, Artificial Sequence
  primer
gtaaaacgacggccagtcgtaaacagccacaactaatgc

SEQ ID NO: 101953 - DNA, 25 bp, Artificial Sequence
  primer
ttaaagacccaaatcttctcactgg

SEQ ID NO: 101954 - DNA, 19 bp, Artificial Sequence
  primer
agcacagggcctcaaacac

SEQ ID NO: 101955 - DNA, 43 bp, Artificial Sequence
  primer
gtaaaacgacggccagttggtatctccactgtctacaaatagg

SEQ ID NO: 101956 - DNA, 38 bp, Artificial Sequence
  primer
gtaaaacgacggccagtccaggatgtgttccattccag

SEQ ID NO: 101957 - DNA, 41 bp, Artificial Sequence
  primer
gtaaaacgacggccagtaatctcagccaaagattatggaag

SEQ ID NO: 101958 - DNA, 21 bp, Artificial Sequence
  primer
tgtggaaggacaatgtcaacc

SEQ ID NO: 101959 - DNA, 38 bp, Artificial Sequence
  primer
gtaaaacgacggccagtctggaaggcaattgctcataa

SEQ ID NO: 101960 - DNA, 28 bp, Artificial Sequence
  primer
cccaaatcttatttaaccaggtatagtt

SEQ ID NO: 101961 - DNA, 38 bp, Artificial Sequence
  primer
gtaaaacgacggccagtaaatatctgtcccacccaaca

SEQ ID NO: 101962 - DNA, 37 bp, Artificial Sequence
  primer
gtaaaacgacggccagtgggtaaggcatcaagccaag

SEQ ID NO: 101963 - DNA, 21 bp, Artificial Sequence
  primer
catctaggctaggcacagtgg

SEQ ID NO: 101964 - DNA, 37 bp, Artificial Sequence
  primer
gtaaaacgacggccagtgggacaggacaagtcctcag

SEQ ID NO: 101965 - DNA, 39 bp, Artificial Sequence
  primer
gtaaaacgacggccagtcccaaagcccattactgaatta

SEQ ID NO: 101966 - DNA, 40 bp, Artificial Sequence
  primer
gtaaaacgacggccagtaaacagctttaaacttctgtgcc

SEQ ID NO: 101967 - DNA, 27 bp, Artificial Sequence
  primer
cagctcagcttagtacgaacaaataac

SEQ ID NO: 101968 - DNA, 22 bp, Artificial Sequence
  primer
ccgatttcagatgacggtctac

SEQ ID NO: 101969 - DNA, 23 bp, Artificial Sequence
  primer
ttgggcttaatatctccttctgc

SEQ ID NO: 101970 - DNA, 21 bp, Artificial Sequence
  primer
tgcttgctgaaatgcaagtag

SEQ ID NO: 101971 - DNA, 43 bp, Artificial Sequence
  primer
gtaaaacgacggccagtttgtaagcctttcatgaatcatagtg

SEQ ID NO: 101972 - DNA, 25 bp, Artificial Sequence
  primer
caattcaaaggctgaattcttactc

SEQ ID NO: 101973 - DNA, 22 bp, Artificial Sequence
  primer
aacgaggcagttatcaccaatc

SEQ ID NO: 101974 - DNA, 21 bp, Artificial Sequence
  primer
agcaaggagagtttcccacag

SEQ ID NO: 101975 - DNA, 39 bp, Artificial Sequence
  primer
gtaaaacgacggccagtggtacaactggtccaaggactg

SEQ ID NO: 101976 - DNA, 21 bp, Artificial Sequence
  primer
actagctgggcatagtggtgg

SEQ ID NO: 101977 - DNA, 21 bp, Artificial Sequence
  primer
tcctgacaagagcaagactcc

SEQ ID NO: 101978 - DNA, 20 bp, Artificial Sequence
  primer
ctgcatggctacacagcaag

SEQ ID NO: 101979 - DNA, 39 bp, Artificial Sequence
  primer
gtaaaacgacggccagtaagggtgagaagaaaggctagg

SEQ ID NO: 101980 - DNA, 20 bp, Artificial Sequence
  primer
agctgtcaatgggcaagatg

SEQ ID NO: 101981 - DNA, 19 bp, Artificial Sequence
  primer
gcccggctgattatgactg

SEQ ID NO: 101982 - DNA, 21 bp, Artificial Sequence
  primer
atttgcctacagaccaccagg

SEQ ID NO: 101983 - DNA, 38 bp, Artificial Sequence
  primer
gtaaaacgacggccagtacacaacgactccaaagatgc

SEQ ID NO: 101984 - DNA, 21 bp, Artificial Sequence
  primer
acaaagggcagaaacaaatgg

SEQ ID NO: 101985 - DNA, 37 bp, Artificial Sequence
  primer
gtaaaacgacggccagtcagcctctatcgtggctcag

SEQ ID NO: 101986 - DNA, 21 bp, Artificial Sequence
  primer
cctcaagtgtggctcaatgtc

SEQ ID NO: 101987 - DNA, 21 bp, Artificial Sequence
  primer
gtctcaagggacctgcacaac

SEQ ID NO: 101988 - DNA, 38 bp, Artificial Sequence
  primer
gtaaaacgacggccagtcctagtcttcatgggtcaggg

SEQ ID NO: 101989 - DNA, 21 bp, Artificial Sequence
  primer
ctacaggtgagggttggaagg

SEQ ID NO: 101990 - DNA, 38 bp, Artificial Sequence
  primer
gtaaaacgacggccagtttgtttgctctacggcttcag

SEQ ID NO: 101991 - DNA, 21 bp, Artificial Sequence
  primer
catggtttagagggaagtggc

SEQ ID NO: 101992 - DNA, 21 bp, Artificial Sequence
  primer
cgtagaaaggtctgggctgtc

SEQ ID NO: 101993 - DNA, 38 bp, Artificial Sequence
  primer
gtaaaacgacggccagtggtttaccttcccttcaagcc

SEQ ID NO: 101994 - DNA, 21 bp, Artificial Sequence
  primer
aaactttctgcaaagcaacgg

SEQ ID NO: 101995 - DNA, 38 bp, Artificial Sequence
  primer
gtaaaacgacggccagtgaatgaaaggctttggtgagg

SEQ ID NO: 101996 - DNA, 38 bp, Artificial Sequence
  primer
gtaaaacgacggccagtgagactgtatggctggcaaag

SEQ ID NO: 101997 - DNA, 38 bp, Artificial Sequence
  primer
gtaaaacgacggccagttcttgctagttgtgcagtccg

SEQ ID NO: 101998 - DNA, 23 bp, Artificial Sequence
  primer
ccaaggaggtgaagcatctatac

SEQ ID NO: 101999 - DNA, 24 bp, Artificial Sequence
  primer
tcatgactgtaatggtgcttacat

SEQ ID NO: 102000 - DNA, 38 bp, Artificial Sequence
  primer
gtaaaacgacggccagttcccttaacgatgacccattc

SEQ ID NO: 102001 - DNA, 21 bp, Artificial Sequence
  primer
accagttggccagttcaattc

SEQ ID NO: 102002 - DNA, 37 bp, Artificial Sequence
  primer
gtaaaacgacggccagtcccaaggtcacacaatttgg

SEQ ID NO: 102003 - DNA, 40 bp, Artificial Sequence
  primer
gtaaaacgacggccagttgccatctgatatgtagccactc

SEQ ID NO: 102004 - DNA, 40 bp, Artificial Sequence
  primer
gtaaaacgacggccagtccaatacagcaaagcttcttgac

SEQ ID NO: 102005 - DNA, 23 bp, Artificial Sequence
  primer
gagccacaagtgttcaactaagg

SEQ ID NO: 102006 - DNA, 25 bp, Artificial Sequence
  primer
ttaattgtgggcctaattacttgaa

SEQ ID NO: 102007 - DNA, 24 bp, Artificial Sequence
  primer
gtgtattgacaatgtgtaggaggg

SEQ ID NO: 102008 - DNA, 38 bp, Artificial Sequence
  primer
gtaaaacgacggccagtacgaaggccagagtcaaagac

SEQ ID NO: 102009 - DNA, 37 bp, Artificial Sequence
  primer
gtaaaacgacggccagtatgtgacattgcccactcag

SEQ ID NO: 102010 - DNA, 38 bp, Artificial Sequence
  primer
gtaaaacgacggccagtcgctcacaatgggtaatgaag

SEQ ID NO: 102011 - DNA, 22 bp, Artificial Sequence
  primer
tttctttgtgctgcaactcttt

SEQ ID NO: 102012 - DNA, 23 bp, Artificial Sequence
  primer
tcatgaaattgccattgttgtag

SEQ ID NO: 102013 - DNA, 21 bp, Artificial Sequence
  primer
ggccaggaatcattcagtgag

SEQ ID NO: 102014 - DNA, 38 bp, Artificial Sequence
  primer
gtaaaacgacggccagtcttcatcctctcttgcatccc

SEQ ID NO: 102015 - DNA, 38 bp, Artificial Sequence
  primer
gtaaaacgacggccagtgtccatggaattgaaaggtgg

SEQ ID NO: 102016 - DNA, 18 bp, Artificial Sequence
  primer
gtgggtccctgacagacg

SEQ ID NO: 102017 - DNA, 26 bp, Artificial Sequence
  primer
gaaattagctaagctttctatttggg

SEQ ID NO: 102018 - DNA, 40 bp, Artificial Sequence
  primer
gtaaaacgacggccagtaaatttcctacagggcattatgg

SEQ ID NO: 102019 - DNA, 24 bp, Artificial Sequence
  primer
caacctcaatgtcaagtttattgc

SEQ ID NO: 102020 - DNA, 27 bp, Artificial Sequence
  primer
aaagacctagaggtgaggaagagtaaa

SEQ ID NO: 102021 - DNA, 26 bp, Artificial Sequence
  primer
aaacctgtcagagtataacttcacca

SEQ ID NO: 102022 - DNA, 24 bp, Artificial Sequence
  primer
tgtgctcaaatgtgaagtttgttt

SEQ ID NO: 102023 - DNA, 26 bp, Artificial Sequence
  primer
aaacaaattcaagttaaggtgaacag

SEQ ID NO: 102024 - DNA, 38 bp, Artificial Sequence
  primer
gtaaaacgacggccagtggagccaagccaacatatctc

SEQ ID NO: 102025 - DNA, 27 bp, Artificial Sequence
  primer
ggtgtttatctaagtgaagaagatggc

SEQ ID NO: 102026 - DNA, 44 bp, Artificial Sequence
  primer
gtaaaacgacggccagttgagctggtatcagtttcttaagtttc

SEQ ID NO: 102027 - DNA, 24 bp, Artificial Sequence
  primer
aatgatttacatggtgtggaagtc

SEQ ID NO: 102028 - DNA, 39 bp, Artificial Sequence
  primer
gtaaaacgacggccagttgttggtgacaggaagaactca

SEQ ID NO: 102029 - DNA, 39 bp, Artificial Sequence
  primer
gtaaaacgacggccagtccaaactaattggaaggaagcc

SEQ ID NO: 102030 - DNA, 21 bp, Artificial Sequence
  primer
gcatgtgtgtcctttcatcag

SEQ ID NO: 102031 - DNA, 39 bp, Artificial Sequence
  primer
gtaaaacgacggccagttgtggtagagccaagaatccag

SEQ ID NO: 102032 - DNA, 39 bp, Artificial Sequence
  primer
gtaaaacgacggccagtttggacccaacgttaatacagc

SEQ ID NO: 102033 - DNA, 20 bp, Artificial Sequence
  primer
atgccaaggcagaagaaagg

SEQ ID NO: 102034 - DNA, 21 bp, Artificial Sequence
  primer
actgcagagctggagagatgg

SEQ ID NO: 102035 - DNA, 21 bp, Artificial Sequence
  primer
gagggtatttgctgtccatgc

SEQ ID NO: 102036 - DNA, 38 bp, Artificial Sequence
  primer
gtaaaacgacggccagttgggcagaatcttgagtgatg

SEQ ID NO: 102037 - DNA, 21 bp, Artificial Sequence
  primer
tttctgaatgctgctattggc

SEQ ID NO: 102038 - DNA, 20 bp, Artificial Sequence
  primer
agcctcggtgacagagaaag

SEQ ID NO: 102039 - DNA, 38 bp, Artificial Sequence
  primer
gtaaaacgacggccagttatgctagaccaagagcaccc

SEQ ID NO: 102040 - DNA, 20 bp, Artificial Sequence
  primer
tgagctgtgctctgcagttg

SEQ ID NO: 102041 - DNA, 37 bp, Artificial Sequence
  primer
gtaaaacgacggccagtaaaggcaaacaaatccaggc

SEQ ID NO: 102042 - DNA, 22 bp, Artificial Sequence
  primer
gagttgtaatcaatcgcaccac

SEQ ID NO: 102043 - DNA, 38 bp, Artificial Sequence
  primer
gtaaaacgacggccagtggttcaggtgcaagtgtttcc

SEQ ID NO: 102044 - DNA, 20 bp, Artificial Sequence
  primer
ttgttggttggtttgggttg

SEQ ID NO: 102045 - DNA, 21 bp, Artificial Sequence
  primer
cacatctggcatatgctgtcc

SEQ ID NO: 102046 - DNA, 22 bp, Artificial Sequence
  primer
cctgtaacccagagagggagag

SEQ ID NO: 102047 - DNA, 21 bp, Artificial Sequence
  primer
caaagctcttggaacagggag

SEQ ID NO: 102048 - DNA, 21 bp, Artificial Sequence
  primer
aggatctgggtgcagactacc

SEQ ID NO: 102049 - DNA, 39 bp, Artificial Sequence
  primer
gtaaaacgacggccagtccaaggataaggtgtcatctgg

SEQ ID NO: 102050 - DNA, 20 bp, Artificial Sequence
  primer
gagattcctggagggcaaag

SEQ ID NO: 102051 - DNA, 21 bp, Artificial Sequence
  primer
ttctgagcaaatctgtgctgg

SEQ ID NO: 102052 - DNA, 22 bp, Artificial Sequence
  primer
ggaacgtggtaaacgctttatg

SEQ ID NO: 102053 - DNA, 21 bp, Artificial Sequence
  primer
agcttcagtcctgaccacaga

SEQ ID NO: 102054 - DNA, 21 bp, Artificial Sequence
  primer
gtaaaggtcggtctccagcac

SEQ ID NO: 102055 - DNA, 38 bp, Artificial Sequence
  primer
gtaaaacgacggccagtcagatcattgaaggcaaccag

SEQ ID NO: 102056 - DNA, 21 bp, Artificial Sequence
  primer
actggccagagcttctcaatc

SEQ ID NO: 102057 - DNA, 39 bp, Artificial Sequence
  primer
gtaaaacgacggccagttcgaggaatgactacaaacgtg

SEQ ID NO: 102058 - DNA, 38 bp, Artificial Sequence
  primer
gtaaaacgacggccagtcctgcttagactggcagtgag

SEQ ID NO: 102059 - DNA, 39 bp, Artificial Sequence
  primer
gtaaaacgacggccagtcccacagaacctacatctcttg

SEQ ID NO: 102060 - DNA, 20 bp, Artificial Sequence
  primer
aggagaactgcctgagtccc

SEQ ID NO: 102061 - DNA, 46 bp, Artificial Sequence
  primer
gtaaaacgacggccagtgatatgtttatgtaacagttggcatattt

SEQ ID NO: 102062 - DNA, 35 bp, Artificial Sequence
  primer
gtaaaacgacggccagttcaagtaatccacccgcc

SEQ ID NO: 102063 - DNA, 42 bp, Artificial Sequence
  primer
gtaaaacgacggccagtgcccaaagaagggttaagagttaag

SEQ ID NO: 102064 - DNA, 39 bp, Artificial Sequence
  primer
gtaaaacgacggccagttgattagcatccacaagagtca

SEQ ID NO: 102065 - DNA, 21 bp, Artificial Sequence
  primer
aaacaatcagcccatctcatt

SEQ ID NO: 102066 - DNA, 21 bp, Artificial Sequence
  primer
tgaatgcaaagcaaacttgaa

SEQ ID NO: 102067 - DNA, 25 bp, Artificial Sequence
  primer
tgttagaggctttccttgtagaatc

SEQ ID NO: 102068 - DNA, 21 bp, Artificial Sequence
  primer
caggtgaaacacagggagaaa

SEQ ID NO: 102069 - DNA, 24 bp, Artificial Sequence
  primer
ttagcattcagaaggcattatttg

SEQ ID NO: 102070 - DNA, 25 bp, Artificial Sequence
  primer
gaatggatttgaaatgacaagaatc

SEQ ID NO: 102071 - DNA, 20 bp, Artificial Sequence
  primer
caaagtccttgcaaacaggc

SEQ ID NO: 102072 - DNA, 21 bp, Artificial Sequence
  primer
tacacactcaagccactgtgc

SEQ ID NO: 102073 - DNA, 27 bp, Artificial Sequence
  primer
tcaagctactaatctcacataattgaa

SEQ ID NO: 102074 - DNA, 23 bp, Artificial Sequence
  primer
aaactagcatgggcataagacag

SEQ ID NO: 102075 - DNA, 25 bp, Artificial Sequence
  primer
aaactggatggcttaactcataatc

SEQ ID NO: 102076 - DNA, 23 bp, Artificial Sequence
  primer
tcttgtttcagtaacgctccttg

SEQ ID NO: 102077 - DNA, 21 bp, Artificial Sequence
  primer
gcacaactgcagagtaagcca

SEQ ID NO: 102078 - DNA, 21 bp, Artificial Sequence
  primer
gaacggaattgtttgaaaggg

SEQ ID NO: 102079 - DNA, 21 bp, Artificial Sequence
  primer
agtctcatgtctttggccagc

SEQ ID NO: 102080 - DNA, 40 bp, Artificial Sequence
  primer
gtaaaacgacggccagtaccaatattaacaatgctgggaa

SEQ ID NO: 102081 - DNA, 26 bp, Artificial Sequence
  primer
tggcatcacttagttcacttactttg

SEQ ID NO: 102082 - DNA, 41 bp, Artificial Sequence
  primer
gtaaaacgacggccagttcaagagaagagaaacccttcaac

SEQ ID NO: 102083 - DNA, 20 bp, Artificial Sequence
  primer
tgccacagctcctcttgaac

SEQ ID NO: 102084 - DNA, 38 bp, Artificial Sequence
  primer
gtaaaacgacggccagtaagaaaggaaggaaggaaggg

SEQ ID NO: 102085 - DNA, 24 bp, Artificial Sequence
  primer
aaccaaacaatttctgtcacttcc

SEQ ID NO: 102086 - DNA, 38 bp, Artificial Sequence
  primer
gtaaaacgacggccagttcatgcaagtgacccagaaac

SEQ ID NO: 102087 - DNA, 21 bp, Artificial Sequence
  primer
ttcaacagttggctgcatttc

SEQ ID NO: 102088 - DNA, 38 bp, Artificial Sequence
  primer
gtaaaacgacggccagtaccaaaccacaaagcacaacc

SEQ ID NO: 102089 - DNA, 27 bp, Artificial Sequence
  primer
cacagaaatacttgatttgtctgaatg

SEQ ID NO: 102090 - DNA, 38 bp, Artificial Sequence
  primer
gtaaaacgacggccagtggttggttggacatgctaaag

SEQ ID NO: 102091 - DNA, 22 bp, Artificial Sequence
  primer
tggcaatccctaacatacaaag

SEQ ID NO: 102092 - DNA, 44 bp, Artificial Sequence
  primer
gtaaaacgacggccagtttgcaaaggtacatgataaataagagg

SEQ ID NO: 102093 - DNA, 21 bp, Artificial Sequence
  primer
atggatacttccactcgctgc

SEQ ID NO: 102094 - DNA, 38 bp, Artificial Sequence
  primer
gtaaaacgacggccagttttgtctgccagctgtttctg

SEQ ID NO: 102095 - DNA, 25 bp, Artificial Sequence
  primer
tgcacggaatgtcaagattactaac

SEQ ID NO: 102096 - DNA, 37 bp, Artificial Sequence
  primer
gtaaaacgacggccagtaggcatggtttgctggtatg

SEQ ID NO: 102097 - DNA, 40 bp, Artificial Sequence
  primer
gtaaaacgacggccagtcacaaaccagaaatgtcctcatc

SEQ ID NO: 102098 - DNA, 43 bp, Artificial Sequence
  primer
gtaaaacgacggccagtcaaataccctttcttaccacacaaag

SEQ ID NO: 102099 - DNA, 23 bp, Artificial Sequence
  primer
cagaaagaaatgaagaacttccc

SEQ ID NO: 102100 - DNA, 21 bp, Artificial Sequence
  primer
tggatacacacacaccacaca

SEQ ID NO: 102101 - DNA, 38 bp, Artificial Sequence
  primer
gtaaaacgacggccagtcagagagatgcagctgctaga

SEQ ID NO: 102102 - DNA, 21 bp, Artificial Sequence
  primer
ttgccactgctcgctttatac

SEQ ID NO: 102103 - DNA, 38 bp, Artificial Sequence
  primer
gtaaaacgacggccagttgcccatcaaattcttcattc

SEQ ID NO: 102104 - DNA, 38 bp, Artificial Sequence
  primer
gtaaaacgacggccagtacaggcacacaagtgcagaag

SEQ ID NO: 102105 - DNA, 21 bp, Artificial Sequence
  primer
gaagccatcatcattgtcagg

SEQ ID NO: 102106 - DNA, 21 bp, Artificial Sequence
  primer
tattcaaagcctttcactccc

SEQ ID NO: 102107 - DNA, 22 bp, Artificial Sequence
  primer
ttgctttgttgcagtattccag

SEQ ID NO: 102108 - DNA, 21 bp, Artificial Sequence
  primer
ctccactcccatctccctacc

SEQ ID NO: 102109 - DNA, 38 bp, Artificial Sequence
  primer
gtaaaacgacggccagtacatgcacacaccacttatgg

SEQ ID NO: 102110 - DNA, 25 bp, Artificial Sequence
  primer
gtccttgaatatcaaagaacattcc

SEQ ID NO: 102111 - DNA, 43 bp, Artificial Sequence
  primer
gtaaaacgacggccagttcaagttactgctgagtattctgaaa

SEQ ID NO: 102112 - DNA, 37 bp, Artificial Sequence
  primer
gtaaaacgacggccagtagtgtgtcagggcctccttc

SEQ ID NO: 102113 - DNA, 39 bp, Artificial Sequence
  primer
gtaaaacgacggccagtcgaccattgtatctctcttggc

SEQ ID NO: 102114 - DNA, 39 bp, Artificial Sequence
  primer
gtaaaacgacggccagtgcccttaaagacagagacttgg

SEQ ID NO: 102115 - DNA, 43 bp, Artificial Sequence
  primer
gtaaaacgacggccagtaaatggatacacatgttctctcacac

SEQ ID NO: 102116 - DNA, 22 bp, Artificial Sequence
  primer
ggaaagacggtttattgctacc

SEQ ID NO: 102117 - DNA, 21 bp, Artificial Sequence
  primer
taaagttcaaacaacgcagcc

SEQ ID NO: 102118 - DNA, 21 bp, Artificial Sequence
  primer
acagaggatgctcttgccttc

SEQ ID NO: 102119 - DNA, 38 bp, Artificial Sequence
  primer
gtaaaacgacggccagtcagtggtgaagatgggtcctc

SEQ ID NO: 102120 - DNA, 37 bp, Artificial Sequence
  primer
gtaaaacgacggccagtcacctcttgccaattgcttc

SEQ ID NO: 102121 - DNA, 22 bp, Artificial Sequence
  primer
aaaggccaaacaaagctagagg

SEQ ID NO: 102122 - DNA, 21 bp, Artificial Sequence
  primer
tgagcatttcctggtcattcc

SEQ ID NO: 102123 - DNA, 24 bp, Artificial Sequence
  primer
tcttagggaacccttggtataagc

SEQ ID NO: 102124 - DNA, 21 bp, Artificial Sequence
  primer
agtgccaacaatggctactcc

SEQ ID NO: 102125 - DNA, 21 bp, Artificial Sequence
  primer
cctaggtaccagtgaccagcc

SEQ ID NO: 102126 - DNA, 37 bp, Artificial Sequence
  primer
gtaaaacgacggccagtcaagggcaatgcagtgagac

SEQ ID NO: 102127 - DNA, 20 bp, Artificial Sequence
  primer
aaagcaagcctacctttgcc

SEQ ID NO: 102128 - DNA, 39 bp, Artificial Sequence
  primer
gtaaaacgacggccagtttctctgggttcctgttaatgg

SEQ ID NO: 102129 - DNA, 21 bp, Artificial Sequence
  primer
ctccactaccaggtctagcgg

SEQ ID NO: 102130 - DNA, 21 bp, Artificial Sequence
  primer
cacaagattcagactccgagg

SEQ ID NO: 102131 - DNA, 21 bp, Artificial Sequence
  primer
tagcagggagagacacactgg

SEQ ID NO: 102132 - DNA, 39 bp, Artificial Sequence
  primer
gtaaaacgacggccagttgggtgtctctactggattctg

SEQ ID NO: 102133 - DNA, 37 bp, Artificial Sequence
  primer
gtaaaacgacggccagtgaccagtctgggagccctac

SEQ ID NO: 102134 - DNA, 23 bp, Artificial Sequence
  primer
ggcaaataacacagggagacttc

SEQ ID NO: 102135 - DNA, 21 bp, Artificial Sequence
  primer
gccaaggaagagaacatctcc

SEQ ID NO: 102136 - DNA, 38 bp, Artificial Sequence
  primer
gtaaaacgacggccagtgtgcaatgtcaccttccaaac

SEQ ID NO: 102137 - DNA, 25 bp, Artificial Sequence
  primer
tgatgaggtagattgtttcctatgc

SEQ ID NO: 102138 - DNA, 38 bp, Artificial Sequence
  primer
gtaaaacgacggccagttgggctaattcagaagttgga

SEQ ID NO: 102139 - DNA, 38 bp, Artificial Sequence
  primer
gtaaaacgacggccagtaggagcaccatatcccatttc

SEQ ID NO: 102140 - DNA, 39 bp, Artificial Sequence
  primer
gtaaaacgacggccagtcctctatcacctttgatgcctg

SEQ ID NO: 102141 - DNA, 21 bp, Artificial Sequence
  primer
ctggccctgtctcacctttag

SEQ ID NO: 102142 - DNA, 21 bp, Artificial Sequence
  primer
gaggcccttagttgctatgcc

SEQ ID NO: 102143 - DNA, 21 bp, Artificial Sequence
  primer
cttgggtcataatgctgttgc

SEQ ID NO: 102144 - DNA, 39 bp, Artificial Sequence
  primer
gtaaaacgacggccagtcacattggagccactaggaatc

SEQ ID NO: 102145 - DNA, 40 bp, Artificial Sequence
  primer
gtaaaacgacggccagtggaaggtttgttggtctgatagc

SEQ ID NO: 102146 - DNA, 21 bp, Artificial Sequence
  primer
attgtcccgcctacattcatc

SEQ ID NO: 102147 - DNA, 38 bp, Artificial Sequence
  primer
gtaaaacgacggccagttggtgaccacaaggtatttgg

SEQ ID NO: 102148 - DNA, 23 bp, Artificial Sequence
  primer
tgctcatttatttatcaccagcc

SEQ ID NO: 102149 - DNA, 40 bp, Artificial Sequence
  primer
gtaaaacgacggccagtcagaggaagaaactaggtcaccc

SEQ ID NO: 102150 - DNA, 39 bp, Artificial Sequence
  primer
gtaaaacgacggccagtacaagtgaagcaccattattgc

SEQ ID NO: 102151 - DNA, 43 bp, Artificial Sequence
  primer
gtaaaacgacggccagttgaatgaaaggtttatggtaagtttg

SEQ ID NO: 102152 - DNA, 21 bp, Artificial Sequence
  primer
gcatctgcatgaagcaaagag

SEQ ID NO: 102153 - DNA, 24 bp, Artificial Sequence
  primer
caaggtgtcctagtggtaataggc

SEQ ID NO: 102154 - DNA, 44 bp, Artificial Sequence
  primer
gtaaaacgacggccagtagagaattagacaagacaaatttcagc

SEQ ID NO: 102155 - DNA, 20 bp, Artificial Sequence
  primer
cagttcaaaggcaccagctc

SEQ ID NO: 102156 - DNA, 36 bp, Artificial Sequence
  primer
gtaaaacgacggccagtccctcccacacgcagtaag

SEQ ID NO: 102157 - DNA, 24 bp, Artificial Sequence
  primer
aatttccaaatgctgcttaatttc

SEQ ID NO: 102158 - DNA, 23 bp, Artificial Sequence
  primer
caacattgcattggtcaactacc

SEQ ID NO: 102159 - DNA, 22 bp, Artificial Sequence
  primer
agatatgcacaatccctggaag

SEQ ID NO: 102160 - DNA, 25 bp, Artificial Sequence
  primer
tgaatcacccaaatatcgtaatcag

SEQ ID NO: 102161 - DNA, 37 bp, Artificial Sequence
  primer
gtaaaacgacggccagtgccaacagcatgattaagcg

SEQ ID NO: 102162 - DNA, 24 bp, Artificial Sequence
  primer
tgcgaaatattctctcagattcag

SEQ ID NO: 102163 - DNA, 22 bp, Artificial Sequence
  primer
aaatgtccacattgctcttctg

SEQ ID NO: 102164 - DNA, 21 bp, Artificial Sequence
  primer
acctggaagacctcttggtcc

SEQ ID NO: 102165 - DNA, 22 bp, Artificial Sequence
  primer
gcatggcaattatctggttagc

SEQ ID NO: 102166 - DNA, 39 bp, Artificial Sequence
  primer
gtaaaacgacggccagttccacattggagacaatctagc

SEQ ID NO: 102167 - DNA, 21 bp, Artificial Sequence
  primer
cctctacccaccctcaaacag

SEQ ID NO: 102168 - DNA, 21 bp, Artificial Sequence
  primer
agtcctggcattccctaaaca

SEQ ID NO: 102169 - DNA, 40 bp, Artificial Sequence
  primer
gtaaaacgacggccagtcagaaggcagaccttatacctgc

SEQ ID NO: 102170 - DNA, 38 bp, Artificial Sequence
  primer
gtaaaacgacggccagtttggagtgccaaatgagtttc

SEQ ID NO: 102171 - DNA, 21 bp, Artificial Sequence
  primer
cacgtattcctagccatggga

SEQ ID NO: 102172 - DNA, 38 bp, Artificial Sequence
  primer
gtaaaacgacggccagtcatctgctccctgtggaataa

SEQ ID NO: 102173 - DNA, 20 bp, Artificial Sequence
  primer
ttcgtaaggccaaccctatg

SEQ ID NO: 102174 - DNA, 23 bp, Artificial Sequence
  primer
gtgcatgctcatgtttattatgg

SEQ ID NO: 102175 - DNA, 43 bp, Artificial Sequence
  primer
gtaaaacgacggccagtcaatttctgacaccagttattgaaag

SEQ ID NO: 102176 - DNA, 38 bp, Artificial Sequence
  primer
gtaaaacgacggccagtcaggcgtccacacactctatg

SEQ ID NO: 102177 - DNA, 20 bp, Artificial Sequence
  primer
tgggaatacaggcacacacc

SEQ ID NO: 102178 - DNA, 21 bp, Artificial Sequence
  primer
tacaggtgatacctttggccc

SEQ ID NO: 102179 - DNA, 21 bp, Artificial Sequence
  primer
cgtactctttcacctggaggg

SEQ ID NO: 102180 - DNA, 30 bp, Artificial Sequence
  primer
aagagtgatatcttagtccagttacacaca

SEQ ID NO: 102181 - DNA, 21 bp, Artificial Sequence
  primer
tgcagtaaaggagcagctgag

SEQ ID NO: 102182 - DNA, 22 bp, Artificial Sequence
  primer
tctccatcagctcatccttaaa

SEQ ID NO: 102183 - DNA, 22 bp, Artificial Sequence
  primer
tcatttgatgtacgaaagctgc

SEQ ID NO: 102184 - DNA, 25 bp, Artificial Sequence
  primer
tttaaatggaatctgtagacaaggg

SEQ ID NO: 102185 - DNA, 27 bp, Artificial Sequence
  primer
ccatatgaattgaataccaataggagg

SEQ ID NO: 102186 - DNA, 41 bp, Artificial Sequence
  primer
gtaaaacgacggccagttggaatcacagcatgagagtaatg

SEQ ID NO: 102187 - DNA, 21 bp, Artificial Sequence
  primer
acatgccagacacatatgcag

SEQ ID NO: 102188 - DNA, 37 bp, Artificial Sequence
  primer
gtaaaacgacggccagtaggtaacctttcacctggcg

SEQ ID NO: 102189 - DNA, 27 bp, Artificial Sequence
  primer
aagtattggctaggaaagtaagtagca

SEQ ID NO: 102190 - DNA, 22 bp, Artificial Sequence
  primer
tcagcacggctagctatatttg

SEQ ID NO: 102191 - DNA, 24 bp, Artificial Sequence
  primer
tggataaacattgtacccaagttc

SEQ ID NO: 102192 - DNA, 39 bp, Artificial Sequence
  primer
gtaaaacgacggccagtttctctacctgctccaaatcaa

SEQ ID NO: 102193 - DNA, 22 bp, Artificial Sequence
  primer
ggtgacccttgagttcttaacc

SEQ ID NO: 102194 - DNA, 24 bp, Artificial Sequence
  primer
ttaaagaacataatgcctgcactc

SEQ ID NO: 102195 - DNA, 39 bp, Artificial Sequence
  primer
gtaaaacgacggccagtttcgaaccacagctaagagttg

SEQ ID NO: 102196 - DNA, 43 bp, Artificial Sequence
  primer
gtaaaacgacggccagttcagatttaccatctatgttccagag

SEQ ID NO: 102197 - DNA, 24 bp, Artificial Sequence
  primer
ttgtacctatgttgcatgaagagc

SEQ ID NO: 102198 - DNA, 25 bp, Artificial Sequence
  primer
gaaacactccatgtaagattgattt

SEQ ID NO: 102199 - DNA, 21 bp, Artificial Sequence
  primer
gcacagaggagtggaaagctc

SEQ ID NO: 102200 - DNA, 19 bp, Artificial Sequence
  primer
ggaggaccttctgcacctg

SEQ ID NO: 102201 - DNA, 42 bp, Artificial Sequence
  primer
gtaaaacgacggccagtatgctaacatagacaccttcattca

SEQ ID NO: 102202 - DNA, 24 bp, Artificial Sequence
  primer
gaaacaaatcttctgatcaagtgg

SEQ ID NO: 102203 - DNA, 38 bp, Artificial Sequence
  primer
gtaaaacgacggccagttctgggaagctaaggattgaa

SEQ ID NO: 102204 - DNA, 22 bp, Artificial Sequence
  primer
aaggactgtgtgtgtgtgtgtg

SEQ ID NO: 102205 - DNA, 35 bp, Artificial Sequence
  primer
gtaaaacgacggccagtgggccttgaggaccctac

SEQ ID NO: 102206 - DNA, 21 bp, Artificial Sequence
  primer
cgggtccctgttagaaagaag

SEQ ID NO: 102207 - DNA, 44 bp, Artificial Sequence
  primer
gtaaaacgacggccagttcttataagttcagagaaatcattggc

SEQ ID NO: 102208 - DNA, 35 bp, Artificial Sequence
  primer
gtaaaacgacggccagtatgagctgccaatgcacc

SEQ ID NO: 102209 - DNA, 41 bp, Artificial Sequence
  primer
gtaaaacgacggccagttcaatttggtgcttattcatgttt

SEQ ID NO: 102210 - DNA, 40 bp, Artificial Sequence
  primer
gtaaaacgacggccagtgaccacagggaatcctcatttag

SEQ ID NO: 102211 - DNA, 21 bp, Artificial Sequence
  primer
aatctggctaaggaccgactg

SEQ ID NO: 102212 - DNA, 38 bp, Artificial Sequence
  primer
gtaaaacgacggccagtccacaaaggcatcggtatttc

SEQ ID NO: 102213 - DNA, 21 bp, Artificial Sequence
  primer
aaatcatcaacgatgtttgcc

SEQ ID NO: 102214 - DNA, 21 bp, Artificial Sequence
  primer
tccacctttcagccctatctg

SEQ ID NO: 102215 - DNA, 21 bp, Artificial Sequence
  primer
tttcctcctggtgtctgatcc

SEQ ID NO: 102216 - DNA, 38 bp, Artificial Sequence
  primer
gtaaaacgacggccagtagggtctcaagggtttcacag

SEQ ID NO: 102217 - DNA, 22 bp, Artificial Sequence
  primer
tgaaggcctagggaataggaag

SEQ ID NO: 102218 - DNA, 38 bp, Artificial Sequence
  primer
gtaaaacgacggccagtctaaggaggagagatgcctgg

SEQ ID NO: 102219 - DNA, 38 bp, Artificial Sequence
  primer
gtaaaacgacggccagtactgctagacttaccgcaggg

SEQ ID NO: 102220 - DNA, 21 bp, Artificial Sequence
  primer
gaacagatctgggaatctggg

SEQ ID NO: 102221 - DNA, 21 bp, Artificial Sequence
  primer
agagtctgccctcctttctgg

SEQ ID NO: 102222 - DNA, 38 bp, Artificial Sequence
  primer
gtaaaacgacggccagtgcccatctggttcttggtaac

SEQ ID NO: 102223 - DNA, 20 bp, Artificial Sequence
  primer
cacactcactccagccaacc

SEQ ID NO: 102224 - DNA, 21 bp, Artificial Sequence
  primer
ccctgggagagagaagagagg

SEQ ID NO: 102225 - DNA, 37 bp, Artificial Sequence
  primer
gtaaaacgacggccagtctggtgagaggagagatggg

SEQ ID NO: 102226 - DNA, 38 bp, Artificial Sequence
  primer
gtaaaacgacggccagtgaagtgtcagaacaagcaggg

SEQ ID NO: 102227 - DNA, 21 bp, Artificial Sequence
  primer
tagccagagtgaggacacgac

SEQ ID NO: 102228 - DNA, 22 bp, Artificial Sequence
  primer
gacaccgaacctctgcacttag

SEQ ID NO: 102229 - DNA, 21 bp, Artificial Sequence
  primer
gaggaggacacggtaaagctg

SEQ ID NO: 102230 - DNA, 38 bp, Artificial Sequence
  primer
gtaaaacgacggccagttccctttagtgctcatgtccc

SEQ ID NO: 102231 - DNA, 21 bp, Artificial Sequence
  primer
ggcagctagaaaggtggagag

SEQ ID NO: 102232 - DNA, 21 bp, Artificial Sequence
  primer
cgatagccaagaaggcaagag

SEQ ID NO: 102233 - DNA, 21 bp, Artificial Sequence
  primer
cccagggtctcttctatccag

SEQ ID NO: 102234 - DNA, 21 bp, Artificial Sequence
  primer
cccagcagacatttagggttc

SEQ ID NO: 102235 - DNA, 21 bp, Artificial Sequence
  primer
tccctacacttcttccaaccc

SEQ ID NO: 102236 - DNA, 38 bp, Artificial Sequence
  primer
gtaaaacgacggccagtaacattgctgtctgggtaggg

SEQ ID NO: 102237 - DNA, 38 bp, Artificial Sequence
  primer
gtaaaacgacggccagttggaaggaccaagctcctaag

SEQ ID NO: 102238 - DNA, 21 bp, Artificial Sequence
  primer
ttcacgcctatgtcacctttg

SEQ ID NO: 102239 - DNA, 21 bp, Artificial Sequence
  primer
gcactggaactgtggagtctg

SEQ ID NO: 102240 - DNA, 38 bp, Artificial Sequence
  primer
gtaaaacgacggccagttaatgcatggccatcttcaac

SEQ ID NO: 102241 - DNA, 38 bp, Artificial Sequence
  primer
gtaaaacgacggccagttttctggaatcagggatcagg

SEQ ID NO: 102242 - DNA, 38 bp, Artificial Sequence
  primer
gtaaaacgacggccagtcattacccagggtgagactcc

SEQ ID NO: 102243 - DNA, 21 bp, Artificial Sequence
  primer
ggtcaggatgttgagggagag

SEQ ID NO: 102244 - DNA, 38 bp, Artificial Sequence
  primer
gtaaaacgacggccagtgaggtcaggatgttgagggag

SEQ ID NO: 102245 - DNA, 21 bp, Artificial Sequence
  primer
aggccctagagacagaggtgg

SEQ ID NO: 102246 - DNA, 38 bp, Artificial Sequence
  primer
gtaaaacgacggccagtaactctcagctggaaagcagg

SEQ ID NO: 102247 - DNA, 38 bp, Artificial Sequence
  primer
gtaaaacgacggccagtaatgcagtgaaagcaggtgtg

SEQ ID NO: 102248 - DNA, 36 bp, Artificial Sequence
  primer
gtaaaacgacggccagtggcgtgtgaccgagagaag

SEQ ID NO: 102249 - DNA, 38 bp, Artificial Sequence
  primer
gtaaaacgacggccagtccatgctcccaaattaaacag

SEQ ID NO: 102250 - DNA, 38 bp, Artificial Sequence
  primer
gtaaaacgacggccagtagaagggtgagagctggagag

SEQ ID NO: 102251 - DNA, 21 bp, Artificial Sequence
  primer
tatcagaatgccactcccacc

SEQ ID NO: 102252 - DNA, 20 bp, Artificial Sequence
  primer
tgggacaggaggaaggagtc

SEQ ID NO: 102253 - DNA, 21 bp, Artificial Sequence
  primer
ggtgatgggtagagtgggaag

SEQ ID NO: 102254 - DNA, 20 bp, Artificial Sequence
  primer
ggccctgggtaagagaagag

SEQ ID NO: 102255 - DNA, 38 bp, Artificial Sequence
  primer
gtaaaacgacggccagtagcagagacaaggacacaggg

SEQ ID NO: 102256 - DNA, 20 bp, Artificial Sequence
  primer
cacagccctaggcagatagg

SEQ ID NO: 102257 - DNA, 21 bp, Artificial Sequence
  primer
ctgagcatgaatggtggagag

SEQ ID NO: 102258 - DNA, 38 bp, Artificial Sequence
  primer
gtaaaacgacggccagtttaggatggaggtgccatttc

SEQ ID NO: 102259 - DNA, 21 bp, Artificial Sequence
  primer
tggagatcctgactctcctgg

SEQ ID NO: 102260 - DNA, 37 bp, Artificial Sequence
  primer
gtaaaacgacggccagtcagctcaaggaggtcacagg

SEQ ID NO: 102261 - DNA, 21 bp, Artificial Sequence
  primer
ctccaagatcctccctcacac

SEQ ID NO: 102262 - DNA, 21 bp, Artificial Sequence
  primer
ctgcagaagtgaagcaaggtc

SEQ ID NO: 102263 - DNA, 38 bp, Artificial Sequence
  primer
gtaaaacgacggccagtgtgtttatcctccagccaagg

SEQ ID NO: 102264 - DNA, 21 bp, Artificial Sequence
  primer
gataccacacgcccttaaacc

SEQ ID NO: 102265 - DNA, 38 bp, Artificial Sequence
  primer
gtaaaacgacggccagtaacatgggagaggtggagatg

SEQ ID NO: 102266 - DNA, 38 bp, Artificial Sequence
  primer
gtaaaacgacggccagtcttgctgaccctgaagatttg

SEQ ID NO: 102267 - DNA, 21 bp, Artificial Sequence
  primer
tcttaagggagaggtgggacc

SEQ ID NO: 102268 - DNA, 20 bp, Artificial Sequence
  primer
acttgggtcccacaggtttc

SEQ ID NO: 102269 - DNA, 37 bp, Artificial Sequence
  primer
gtaaaacgacggccagtcgcttacccacagctgagtc

SEQ ID NO: 102270 - DNA, 21 bp, Artificial Sequence
  primer
ggaccctgaggactatgcttg

SEQ ID NO: 102271 - DNA, 21 bp, Artificial Sequence
  primer
aagatcaaatcagcctcctgg

SEQ ID NO: 102272 - DNA, 38 bp, Artificial Sequence
  primer
gtaaaacgacggccagtaaggttggtgtgagggtgaag

SEQ ID NO: 102273 - DNA, 21 bp, Artificial Sequence
  primer
acccaacaccttcaccaagac

SEQ ID NO: 102274 - DNA, 38 bp, Artificial Sequence
  primer
gtaaaacgacggccagtaacccagaaaccactaagccc

SEQ ID NO: 102275 - DNA, 37 bp, Artificial Sequence
  primer
gtaaaacgacggccagtcatccctgacaatccagcag

SEQ ID NO: 102276 - DNA, 38 bp, Artificial Sequence
  primer
gtaaaacgacggccagtatagtgaggagccctcttggg

SEQ ID NO: 102277 - DNA, 39 bp, Artificial Sequence
  primer
gtaaaacgacggccagtctaaacacactgtgcctctccc

SEQ ID NO: 102278 - DNA, 38 bp, Artificial Sequence
  primer
gtaaaacgacggccagtggaaatgaggaagaaccctcc

SEQ ID NO: 102279 - DNA, 39 bp, Artificial Sequence
  primer
gtaaaacgacggccagtcgaaaccaacaagaagcaattc

SEQ ID NO: 102280 - DNA, 21 bp, Artificial Sequence
  primer
tctgaaggagagaaaccaccg

SEQ ID NO: 102281 - DNA, 38 bp, Artificial Sequence
  primer
gtaaaacgacggccagtggcttcctaaagcacagcttc

SEQ ID NO: 102282 - DNA, 21 bp, Artificial Sequence
  primer
tgctgtttccagagaccagag

SEQ ID NO: 102283 - DNA, 22 bp, Artificial Sequence
  primer
ctgtgctccttccagataaagc

SEQ ID NO: 102284 - DNA, 21 bp, Artificial Sequence
  primer
aggcaatgcatcatttctttc

SEQ ID NO: 102285 - DNA, 40 bp, Artificial Sequence
  primer
gtaaaacgacggccagtcatccttccttgaggaatcaatc

SEQ ID NO: 102286 - DNA, 26 bp, Artificial Sequence
  primer
tggtatcaacaagttgagttgctaaa

SEQ ID NO: 102287 - DNA, 22 bp, Artificial Sequence
  primer
tccaaacaagtaaggcattctg

SEQ ID NO: 102288 - DNA, 38 bp, Artificial Sequence
  primer
gtaaaacgacggccagtcattgcttcttgatcccttgc

SEQ ID NO: 102289 - DNA, 38 bp, Artificial Sequence
  primer
gtaaaacgacggccagtctgccaattcttgctcaattc

SEQ ID NO: 102290 - DNA, 40 bp, Artificial Sequence
  primer
gtaaaacgacggccagtcctgcttgacaatctaggaacag

SEQ ID NO: 102291 - DNA, 38 bp, Artificial Sequence
  primer
gtaaaacgacggccagtaaggcattggcaattctgaac

SEQ ID NO: 102292 - DNA, 42 bp, Artificial Sequence
  primer
gtaaaacgacggccagttttatctggatagttgtcccaattt

SEQ ID NO: 102293 - DNA, 39 bp, Artificial Sequence
  primer
gtaaaacgacggccagtaagagaaaggattgcacacttc

SEQ ID NO: 102294 - DNA, 22 bp, Artificial Sequence
  primer
actgcatgtcacttgagctgat

SEQ ID NO: 102295 - DNA, 43 bp, Artificial Sequence
  primer
gtaaaacgacggccagtcaaatgaagtagacataccaaagtca

SEQ ID NO: 102296 - DNA, 37 bp, Artificial Sequence
  primer
gtaaaacgacggccagtccagcagcaccaagcataag

SEQ ID NO: 102297 - DNA, 38 bp, Artificial Sequence
  primer
gtaaaacgacggccagtgcatgcttgactggatgtttg

SEQ ID NO: 102298 - DNA, 21 bp, Artificial Sequence
  primer
gtattgcctcctttgtacggc

SEQ ID NO: 102299 - DNA, 38 bp, Artificial Sequence
  primer
gtaaaacgacggccagtattcaaagccatgcctagtgg

SEQ ID NO: 102300 - DNA, 23 bp, Artificial Sequence
  primer
aaataaacacggttctgtggaaa

SEQ ID NO: 102301 - DNA, 35 bp, Artificial Sequence
  primer
gtaaaacgacggccagtacatccaaccggcagagg

SEQ ID NO: 102302 - DNA, 36 bp, Artificial Sequence
  primer
gtaaaacgacggccagtctcttcatccctcttgccc

SEQ ID NO: 102303 - DNA, 24 bp, Artificial Sequence
  primer
gaaattatttggaaggtaggcaaa

SEQ ID NO: 102304 - DNA, 38 bp, Artificial Sequence
  primer
gtaaaacgacggccagtatgtgttgcagaccacaaacc

SEQ ID NO: 102305 - DNA, 21 bp, Artificial Sequence
  primer
ctcgaatgaatttgagatgcc

SEQ ID NO: 102306 - DNA, 21 bp, Artificial Sequence
  primer
taaggaatctggatgggaagg

SEQ ID NO: 102307 - DNA, 40 bp, Artificial Sequence
  primer
gtaaaacgacggccagttccaagcattattaaacactggc

SEQ ID NO: 102308 - DNA, 21 bp, Artificial Sequence
  primer
ttagccagatgttcctcctgc

SEQ ID NO: 102309 - DNA, 26 bp, Artificial Sequence
  primer
aaacagaatttgggaacacattacta

SEQ ID NO: 102310 - DNA, 39 bp, Artificial Sequence
  primer
gtaaaacgacggccagtcccaagctgatcaatacactcc

SEQ ID NO: 102311 - DNA, 38 bp, Artificial Sequence
  primer
gtaaaacgacggccagtcagattattccatccaatgcg

SEQ ID NO: 102312 - DNA, 44 bp, Artificial Sequence
  primer
gtaaaacgacggccagtcagtgtttccagataaagagatgattc

SEQ ID NO: 102313 - DNA, 21 bp, Artificial Sequence
  primer
ttacccaggctctaaggcatc

SEQ ID NO: 102314 - DNA, 22 bp, Artificial Sequence
  primer
tctttaatgggcctttatggtc

SEQ ID NO: 102315 - DNA, 38 bp, Artificial Sequence
  primer
gtaaaacgacggccagttcccaggctatcaaacgtgac

SEQ ID NO: 102316 - DNA, 21 bp, Artificial Sequence
  primer
agaaagcacccatctctcacc

SEQ ID NO: 102317 - DNA, 21 bp, Artificial Sequence
  primer
ggactcaaccgtactcacagc

SEQ ID NO: 102318 - DNA, 40 bp, Artificial Sequence
  primer
gtaaaacgacggccagtcaaattcctttcacatgtcatca

SEQ ID NO: 102319 - DNA, 39 bp, Artificial Sequence
  primer
gtaaaacgacggccagttggttacaggaaacttggtgtg

SEQ ID NO: 102320 - DNA, 21 bp, Artificial Sequence
  primer
agcctgcctacataatgctga

SEQ ID NO: 102321 - DNA, 27 bp, Artificial Sequence
  primer
cagtgtcatcaccaattatatttcaag

SEQ ID NO: 102322 - DNA, 38 bp, Artificial Sequence
  primer
gtaaaacgacggccagtaggtacctgcacaggattcac

SEQ ID NO: 102323 - DNA, 21 bp, Artificial Sequence
  primer
tgcacatgcagcgtaaataag

SEQ ID NO: 102324 - DNA, 39 bp, Artificial Sequence
  primer
gtaaaacgacggccagtcatttatacccaattccctccc

SEQ ID NO: 102325 - DNA, 21 bp, Artificial Sequence
  primer
gccattagtcacacccaactg

SEQ ID NO: 102326 - DNA, 22 bp, Artificial Sequence
  primer
ccgtgcagagtgaaacagaaac

SEQ ID NO: 102327 - DNA, 38 bp, Artificial Sequence
  primer
gtaaaacgacggccagtacagacttgatcccacaaagg

SEQ ID NO: 102328 - DNA, 38 bp, Artificial Sequence
  primer
gtaaaacgacggccagtcctgtatgctgagtagctggg

SEQ ID NO: 102329 - DNA, 22 bp, Artificial Sequence
  primer
tcagggtcatccataagcagtc

SEQ ID NO: 102330 - DNA, 27 bp, Artificial Sequence
  primer
tcttgctagaagctgtaatcaacataa

SEQ ID NO: 102331 - DNA, 26 bp, Artificial Sequence
  primer
aagattcataaccaaatggtaagcag

SEQ ID NO: 102332 - DNA, 41 bp, Artificial Sequence
  primer
gtaaaacgacggccagttttgatctgaccaagaaatttgac

SEQ ID NO: 102333 - DNA, 38 bp, Artificial Sequence
  primer
gtaaaacgacggccagtgtgcagtgctacttcctctcc

SEQ ID NO: 102334 - DNA, 38 bp, Artificial Sequence
  primer
gtaaaacgacggccagtttgcacggctgaagaaatatg

SEQ ID NO: 102335 - DNA, 21 bp, Artificial Sequence
  primer
gcacactgaacctgagctgac

SEQ ID NO: 102336 - DNA, 38 bp, Artificial Sequence
  primer
gtaaaacgacggccagtcggtgactaacctcgttgaat

SEQ ID NO: 102337 - DNA, 38 bp, Artificial Sequence
  primer
gtaaaacgacggccagtccagggtatgaaatggaaatg

SEQ ID NO: 102338 - DNA, 38 bp, Artificial Sequence
  primer
gtaaaacgacggccagtattagctttgcagctttgcag

SEQ ID NO: 102339 - DNA, 38 bp, Artificial Sequence
  primer
gtaaaacgacggccagttgtgcttcaaaggcaggttac

SEQ ID NO: 102340 - DNA, 24 bp, Artificial Sequence
  primer
tgcttcaaacacattacagcagag

SEQ ID NO: 102341 - DNA, 38 bp, Artificial Sequence
  primer
gtaaaacgacggccagtaactgctcgcatcatgttctg

SEQ ID NO: 102342 - DNA, 45 bp, Artificial Sequence
  primer
gtaaaacgacggccagtgcttatcaaatgaaatgaaagagaaatc

SEQ ID NO: 102343 - DNA, 37 bp, Artificial Sequence
  primer
gtaaaacgacggccagtagatgccttcaacctgtccc

SEQ ID NO: 102344 - DNA, 22 bp, Artificial Sequence
  primer
tgaagttgtgaatctcttcggg

SEQ ID NO: 102345 - DNA, 39 bp, Artificial Sequence
  primer
gtaaaacgacggccagttcaaatcagccttccttcaatc

SEQ ID NO: 102346 - DNA, 38 bp, Artificial Sequence
  primer
gtaaaacgacggccagtcccggttcgttaaccattatc

SEQ ID NO: 102347 - DNA, 38 bp, Artificial Sequence
  primer
gtaaaacgacggccagtactaaggctgaggttgagccc

SEQ ID NO: 102348 - DNA, 38 bp, Artificial Sequence
  primer
gtaaaacgacggccagtagccatatttggtcaagaggc

SEQ ID NO: 102349 - DNA, 36 bp, Artificial Sequence
  primer
gtaaaacgacggccagtggctgaacagtctggaggc

SEQ ID NO: 102350 - DNA, 20 bp, Artificial Sequence
  primer
gaggtgtggctagagcatgg

SEQ ID NO: 102351 - DNA, 38 bp, Artificial Sequence
  primer
gtaaaacgacggccagtagtggcctgtcacccagatac

SEQ ID NO: 102352 - DNA, 21 bp, Artificial Sequence
  primer
ctccctccctaaagcacactg

SEQ ID NO: 102353 - DNA, 21 bp, Artificial Sequence
  primer
ccttaacatcaacatcggcac

SEQ ID NO: 102354 - DNA, 38 bp, Artificial Sequence
  primer
gtaaaacgacggccagttccttaatgaccagggtttgg

SEQ ID NO: 102355 - DNA, 22 bp, Artificial Sequence
  primer
ccactagtgacaaccttcagcc

SEQ ID NO: 102356 - DNA, 37 bp, Artificial Sequence
  primer
gtaaaacgacggccagtatggacagccattcctgttg

SEQ ID NO: 102357 - DNA, 39 bp, Artificial Sequence
  primer
gtaaaacgacggccagtggaaacctccactgctcttacc

SEQ ID NO: 102358 - DNA, 38 bp, Artificial Sequence
  primer
gtaaaacgacggccagtaccgaatctattatgcggcac

SEQ ID NO: 102359 - DNA, 21 bp, Artificial Sequence
  primer
tccaacataccgagtcagacg

SEQ ID NO: 102360 - DNA, 19 bp, Artificial Sequence
  primer
gatgtgcaatgttgggctg

SEQ ID NO: 102361 - DNA, 21 bp, Artificial Sequence
  primer
ggtagttgtgggtcttctggg

SEQ ID NO: 102362 - DNA, 21 bp, Artificial Sequence
  primer
tgcctattcaaggtttggagg

SEQ ID NO: 102363 - DNA, 38 bp, Artificial Sequence
  primer
gtaaaacgacggccagtcctcagtcaccttctgtgctg

SEQ ID NO: 102364 - DNA, 21 bp, Artificial Sequence
  primer
gatcccagtaatttggctccc

SEQ ID NO: 102365 - DNA, 37 bp, Artificial Sequence
  primer
gtaaaacgacggccagtagctgaggagagagggatgg

SEQ ID NO: 102366 - DNA, 38 bp, Artificial Sequence
  primer
gtaaaacgacggccagtgttatgcacctggcacaaatg

SEQ ID NO: 102367 - DNA, 20 bp, Artificial Sequence
  primer
cagtgtgctcctgaccagtg

SEQ ID NO: 102368 - DNA, 21 bp, Artificial Sequence
  primer
tgcagtctgggagacagacac

SEQ ID NO: 102369 - DNA, 37 bp, Artificial Sequence
  primer
gtaaaacgacggccagtgctagagaaggcgggatgtc

SEQ ID NO: 102370 - DNA, 38 bp, Artificial Sequence
  primer
gtaaaacgacggccagttgcatgactgctgtctcagtg

SEQ ID NO: 102371 - DNA, 21 bp, Artificial Sequence
  primer
aggcacagacctgtctcttgg

SEQ ID NO: 102372 - DNA, 21 bp, Artificial Sequence
  primer
aaggagagaaagcgaggaagc

SEQ ID NO: 102373 - DNA, 38 bp, Artificial Sequence
  primer
gtaaaacgacggccagtaatcaaatccttgcttccagg

SEQ ID NO: 102374 - DNA, 38 bp, Artificial Sequence
  primer
gtaaaacgacggccagtgtgaattacaggagcccaagc

SEQ ID NO: 102375 - DNA, 21 bp, Artificial Sequence
  primer
agggccaattctagagccttc

SEQ ID NO: 102376 - DNA, 37 bp, Artificial Sequence
  primer
gtaaaacgacggccagtatcatgcaaagtgcaaagcc

SEQ ID NO: 102377 - DNA, 21 bp, Artificial Sequence
  primer
ctgacctatggtggtgctcag

SEQ ID NO: 102378 - DNA, 21 bp, Artificial Sequence
  primer
accaggtgtcaatgatggatg

SEQ ID NO: 102379 - DNA, 38 bp, Artificial Sequence
  primer
gtaaaacgacggccagtcaggtgggaaagacaaaccac

SEQ ID NO: 102380 - DNA, 21 bp, Artificial Sequence
  primer
atggaagaaggaaggcatgag

SEQ ID NO: 102381 - DNA, 21 bp, Artificial Sequence
  primer
tgatctcctgacctcgtgatg

SEQ ID NO: 102382 - DNA, 38 bp, Artificial Sequence
  primer
gtaaaacgacggccagtaggcttccatgtgaggatcag

SEQ ID NO: 102383 - DNA, 38 bp, Artificial Sequence
  primer
gtaaaacgacggccagtagcatccgtgtagacatttgg

SEQ ID NO: 102384 - DNA, 21 bp, Artificial Sequence
  primer
tcttgctgcctcatctgtagc

SEQ ID NO: 102385 - DNA, 22 bp, Artificial Sequence
  primer
catgcagacattacgaccaaac

SEQ ID NO: 102386 - DNA, 38 bp, Artificial Sequence; identical to SEQ ID NO: 102354
  primer

SEQ ID NO: 102387 - DNA, 21 bp, Artificial Sequence
  primer
ccttaacatcaacatcggcac

SEQ ID NO: 102388 - DNA, 38 bp, Artificial Sequence
  primer
gtaaaacgacggccagtgctcagtcactggtgaggttg

SEQ ID NO: 102389 - DNA, 38 bp, Artificial Sequence
  primer
gtaaaacgacggccagttcctaacacaatgcttggcac

SEQ ID NO: 102390 - DNA, 24 bp, Artificial Sequence
  primer
tcgttgaaggtaagactgaaggtc

SEQ ID NO: 102391 - DNA, 38 bp, Artificial Sequence
  primer
gtaaaacgacggccagttcttagatgggaccagcaacc

SEQ ID NO: 102392 - DNA, 38 bp, Artificial Sequence
  primer
gtaaaacgacggccagttcctgcaatcctgaaagtcac

SEQ ID NO: 102393 - DNA, 39 bp, Artificial Sequence
  primer
gtaaaacgacggccagtgccatcaaagaatcctaagtgc

SEQ ID NO: 102394 - DNA, 21 bp, Artificial Sequence
  primer
ctggctttcagtgaagtgcat

SEQ ID NO: 102395 - DNA, 38 bp, Artificial Sequence
  primer
gtaaaacgacggccagttctgacggctcaggtcttagg

SEQ ID NO: 102396 - DNA, 23 bp, Artificial Sequence
  primer
gggagaacaatatgaacaagtgg

SEQ ID NO: 102397 - DNA, 21 bp, Artificial Sequence
  primer
aagacatagcaccggcaagac

SEQ ID NO: 102398 - DNA, 39 bp, Artificial Sequence
  primer
gtaaaacgacggccagtaatggctatctctcagtggtgg

SEQ ID NO: 102399 - DNA, 22 bp, Artificial Sequence
  primer
ggttctggcaaccttatcactc

SEQ ID NO: 102400 - DNA, 23 bp, Artificial Sequence
  primer
ccactaggctttgagatgattgg

SEQ ID NO: 102401 - DNA, 21 bp, Artificial Sequence
  primer
aagaaggtgctccaggttctg

SEQ ID NO: 102402 - DNA, 22 bp, Artificial Sequence
  primer
aagtgaagaccaactccagcag

SEQ ID NO: 102403 - DNA, 38 bp, Artificial Sequence
  primer
gtaaaacgacggccagtgccaaagataaagcagatggg

SEQ ID NO: 102404 - DNA, 38 bp, Artificial Sequence
  primer
gtaaaacgacggccagtaaaggaagggagggtcatctc

SEQ ID NO: 102405 - DNA, 38 bp, Artificial Sequence
  primer
gtaaaacgacggccagtggagatggcagagtcactgag

SEQ ID NO: 102406 - DNA, 38 bp, Artificial Sequence
  primer
gtaaaacgacggccagtctttcagggtgcattacaggg

SEQ ID NO: 102407 - DNA, 28 bp, Artificial Sequence
  primer
tgataatatctaccctatcactgaccat

SEQ ID NO: 102408 - DNA, 20 bp, Artificial Sequence
  primer
gtgagtccagatcgcaccag

SEQ ID NO: 102409 - DNA, 22 bp, Artificial Sequence
  primer
caagagggctgttgtctaatgc

SEQ ID NO: 102410 - DNA, 37 bp, Artificial Sequence
  primer
gtaaaacgacggccagtaaggaaacaggatgcctgaa

SEQ ID NO: 102411 - DNA, 22 bp, Artificial Sequence
  primer
ccactctttgtgtgcagaattg

SEQ ID NO: 102412 - DNA, 21 bp, Artificial Sequence
  primer
caacaagctgcttccaaacac

SEQ ID NO: 102413 - DNA, 21 bp, Artificial Sequence
  primer
gaagaaagggtgggaacaaag

SEQ ID NO: 102414 - DNA, 22 bp, Artificial Sequence
  primer
gttccatataaagggcatcctg

SEQ ID NO: 102415 - DNA, 23 bp, Artificial Sequence
  primer
gggaggtttatttccatatgctc

SEQ ID NO: 102416 - DNA, 22 bp, Artificial Sequence
  primer
ttcaaccaaaccaaacatttcc

SEQ ID NO: 102417 - DNA, 38 bp, Artificial Sequence
  primer
gtaaaacgacggccagtccgcattatgtgtgagtctgg

SEQ ID NO: 102418 - DNA, 21 bp, Artificial Sequence
  primer
tactgcatcccaggcttagtg

SEQ ID NO: 102419 - DNA, 21 bp, Artificial Sequence
  primer
tgaaatttgagatccaaagcc

SEQ ID NO: 102420 - DNA, 21 bp, Artificial Sequence
  primer
atccattcattcatccatcca

SEQ ID NO: 102421 - DNA, 39 bp, Artificial Sequence
  primer
gtaaaacgacggccagtcagttcacgctgtatgtgatcc

SEQ ID NO: 102422 - DNA, 39 bp, Artificial Sequence
  primer
gtaaaacgacggccagttctctgtgtctcactgcattcc

SEQ ID NO: 102423 - DNA, 25 bp, Artificial Sequence
  primer
gggtgaaataagtcacatttagctc

SEQ ID NO: 102424 - DNA, 38 bp, Artificial Sequence
  primer
gtaaaacgacggccagtttgctttcaaagggactgagg

SEQ ID NO: 102425 - DNA, 20 bp, Artificial Sequence
  primer
tccctgtcagagctcacctg

SEQ ID NO: 102426 - DNA, 39 bp, Artificial Sequence
  primer
gtaaaacgacggccagttgaaagttcctagggtttgacg

SEQ ID NO: 102427 - DNA, 21 bp, Artificial Sequence
  primer
tggttctttcaaattcaagcc

SEQ ID NO: 102428 - DNA, 40 bp, Artificial Sequence
  primer
gtaaaacgacggccagttttctgactaacagaaaggctgg

SEQ ID NO: 102429 - DNA, 21 bp, Artificial Sequence
  primer
gccacagtctaatgaattggg

SEQ ID NO: 102430 - DNA, 38 bp, Artificial Sequence
  primer
gtaaaacgacggccagttttgatgggtcagtgatggtc

SEQ ID NO: 102431 - DNA, 42 bp, Artificial Sequence
  primer
gtaaaacgacggccagttccattgtttcagactttatccttg

SEQ ID NO: 102432 - DNA, 24 bp, Artificial Sequence
  primer
tccttattaacaaagaagcctccc

SEQ ID NO: 102433 - DNA, 21 bp, Artificial Sequence
  primer
aaggaagtgaggcattcaagc

SEQ ID NO: 102434 - DNA, 21 bp, Artificial Sequence
  primer
ccaaggaggagatttaggctg

SEQ ID NO: 102435 - DNA, 35 bp, Artificial Sequence
  primer
gtaaaacgacggccagtaagatgtgcccgagggag

SEQ ID NO: 102436 - DNA, 20 bp, Artificial Sequence
  primer
cactgagtggcaagactccc

SEQ ID NO: 102437 - DNA, 21 bp, Artificial Sequence
  primer
gtgctcctcacagttcacgag

SEQ ID NO: 102438 - DNA, 38 bp, Artificial Sequence
  primer
gtaaaacgacggccagtccaggcctagtgttatttccc

SEQ ID NO: 102439 - DNA, 21 bp, Artificial Sequence
  primer
taggacttgaggcagcagttg

SEQ ID NO: 102440 - DNA, 39 bp, Artificial Sequence
  primer
gtaaaacgacggccagtcacaggtctggaaacaaagagg

SEQ ID NO: 102441 - DNA, 37 bp, Artificial Sequence
  primer
gtaaaacgacggccagtagggtggttctcaccctttc

SEQ ID NO: 102442 - DNA, 38 bp, Artificial Sequence
  primer
gtaaaacgacggccagtgtggttctctctggtgctcag

SEQ ID NO: 102443 - DNA, 21 bp, Artificial Sequence
  primer
cagacacatagggaaagccag

SEQ ID NO: 102444 - DNA, 20 bp, Artificial Sequence
  primer
cttcaccacactcacccagg

SEQ ID NO: 102445 - DNA, 21 bp, Artificial Sequence
  primer
aggccaaggatgactgttgtc

SEQ ID NO: 102446 - DNA, 21 bp, Artificial Sequence
  primer
cctacctctgagaaagctggg

SEQ ID NO: 102447 - DNA, 38 bp, Artificial Sequence
  primer
gtaaaacgacggccagtttagccctcttgctgcttctg

SEQ ID NO: 102448 - DNA, 21 bp, Artificial Sequence
  primer
acttctgggatgctcaaggtg

SEQ ID NO: 102449 - DNA, 37 bp, Artificial Sequence
  primer
gtaaaacgacggccagtcagtttcatctgtccctggc

SEQ ID NO: 102450 - DNA, 36 bp, Artificial Sequence
  primer
gtaaaacgacggccagtaaccttggacagtgctggg

SEQ ID NO: 102451 - DNA, 22 bp, Artificial Sequence
  primer
aagaggcaaggtcaggtttagg

SEQ ID NO: 102452 - DNA, 21 bp, Artificial Sequence
  primer
caatattccagcccagcagtc

SEQ ID NO: 102453 - DNA, 20 bp, Artificial Sequence
  primer
ccctgagaccagggtttagc

SEQ ID NO: 102454 - DNA, 23 bp, Artificial Sequence
  primer
agagcatctcatttccctattgc

SEQ ID NO: 102455 - DNA, 21 bp, Artificial Sequence
  primer
caatactggctccatccatcc

SEQ ID NO: 102456 - DNA, 38 bp, Artificial Sequence
  primer
gtaaaacgacggccagttcatggacaaccttctcctcc

SEQ ID NO: 102457 - DNA, 21 bp, Artificial Sequence
  primer
tgcaaagctttctttccattc

SEQ ID NO: 102458 - DNA, 38 bp, Artificial Sequence
  primer
gtaaaacgacggccagtctgacgcagatggatttcttg

SEQ ID NO: 102459 - DNA, 39 bp, Artificial Sequence
  primer
gtaaaacgacggccagttgtacaaccttatgagcccacc

SEQ ID NO: 102460 - DNA, 20 bp, Artificial Sequence
  primer
ccagatccagctgagagacg

SEQ ID NO: 102461 - DNA, 38 bp, Artificial Sequence
  primer
gtaaaacgacggccagtccaagctgagaacaaccacag

SEQ ID NO: 102462 - DNA, 21 bp, Artificial Sequence
  primer
gactcacctgcataatgaccc

SEQ ID NO: 102463 - DNA, 21 bp, Artificial Sequence
  primer
tccctctgggtcctacacaag

SEQ ID NO: 102464 - DNA, 39 bp, Artificial Sequence
  primer
gtaaaacgacggccagtcaagagaggtgaggtcaacagg

SEQ ID NO: 102465 - DNA, 21 bp, Artificial Sequence
  primer
tcattgccacgacctgttatc

SEQ ID NO: 102466 - DNA, 21 bp, Artificial Sequence
  primer
gttgccaactaggaggctcag

SEQ ID NO: 102467 - DNA, 39 bp, Artificial Sequence
  primer
gtaaaacgacggccagttcacatttctcagtcgcatttg

SEQ ID NO: 102468 - DNA, 21 bp, Artificial Sequence
  primer
cctggaagcagagaacacagg

SEQ ID NO: 102469 - DNA, 22 bp, Artificial Sequence
  primer
tgaccagctaccttctctccag

SEQ ID NO: 102470 - DNA, 37 bp, Artificial Sequence
  primer
gtaaaacgacggccagtcctctgttaggcagtgcagc

SEQ ID NO: 102471 - DNA, 38 bp, Artificial Sequence
  primer
gtaaaacgacggccagtctatcatgaaggcctgatccc

SEQ ID NO: 102472 - DNA, 21 bp, Artificial Sequence
  primer
ctactcacgttgctggaaagc

SEQ ID NO: 102473 - DNA, 38 bp, Artificial Sequence
  primer
gtaaaacgacggccagtctgtgggaacctcctgttagc

SEQ ID NO: 102474 - DNA, 22 bp, Artificial Sequence
  primer
tggttcacccaaacaacttacc

SEQ ID NO: 102475 - DNA, 21 bp, Artificial Sequence
  primer
gccagtaagggagagagcagg

SEQ ID NO: 102476 - DNA, 38 bp, Artificial Sequence
  primer
gtaaaacgacggccagtaagcagctgataaaggcatcc

SEQ ID NO: 102477 - DNA, 29 bp, Artificial Sequence
  primer
tggttgctgttgtaaagaatatgtagtaa

SEQ ID NO: 102478 - DNA, 38 bp, Artificial Sequence
  primer
gtaaaacgacggccagttataactgcccacacgaccac

SEQ ID NO: 102479 - DNA, 37 bp, Artificial Sequence
  primer
gtaaaacgacggccagtatgaggttgaagcctttggg

SEQ ID NO: 102480 - DNA, 21 bp, Artificial Sequence
  primer
gatgcaatgacccacagacag

SEQ ID NO: 102481 - DNA, 21 bp, Artificial Sequence
  primer
gaggtaggtactggtgggctg

SEQ ID NO: 102482 - DNA, 22 bp, Artificial Sequence
  primer
gagaaggacttgttccgatacg

SEQ ID NO: 102483 - DNA, 38 bp, Artificial Sequence
  primer
gtaaaacgacggccagtgggctagggtcagtacaggag

SEQ ID NO: 102484 - DNA, 38 bp, Artificial Sequence
  primer
gtaaaacgacggccagtaaatagggagggcttccagtg

SEQ ID NO: 102485 - DNA, 21 bp, Artificial Sequence
  primer
tggcacctacatgtcctaagc

SEQ ID NO: 102486 - DNA, 38 bp, Artificial Sequence
  primer
gtaaaacgacggccagtggaatgccaggagctgtgtag

SEQ ID NO: 102487 - DNA, 38 bp, Artificial Sequence
  primer
gtaaaacgacggccagtcacaggctttcttccacacag

SEQ ID NO: 102488 - DNA, 38 bp, Artificial Sequence
  primer
gtaaaacgacggccagttagaaacacacagccacaggg

SEQ ID NO: 102489 - DNA, 37 bp, Artificial Sequence
  primer
gtaaaacgacggccagtatgatgggatgatggctcac

SEQ ID NO: 102490 - DNA, 38 bp, Artificial Sequence
  primer
gtaaaacgacggccagtacagaggaagggagggtaagg

SEQ ID NO: 102491 - DNA, 38 bp, Artificial Sequence
  primer
gtaaaacgacggccagttccaaatccaggcttgttacc

SEQ ID NO: 102492 - DNA, 21 bp, Artificial Sequence
  primer
tctaggtcggctgggtatttg

SEQ ID NO: 102493 - DNA, 21 bp, Artificial Sequence
  primer
ccaaggtcagcacatgtcaac

SEQ ID NO: 102494 - DNA, 21 bp, Artificial Sequence
  primer
tgggacagagccttatcttcc

SEQ ID NO: 102495 - DNA, 21 bp, Artificial Sequence
  primer
cgagatcttctaccctcaccc

SEQ ID NO: 102496 - DNA, 21 bp, Artificial Sequence
  primer
ccctatacctggaacacaggc

SEQ ID NO: 102497 - DNA, 21 bp, Artificial Sequence
  primer
caccttctctcccttcacacc

SEQ ID NO: 102498 - DNA, 21 bp, Artificial Sequence
  primer
cactgcacatggacatcagag

SEQ ID NO: 102499 - DNA, 21 bp, Artificial Sequence
  primer
tagccacgagaagtacccagc

SEQ ID NO: 102500 - DNA, 38 bp, Artificial Sequence
  primer
gtaaaacgacggccagtgctgggagaaagtcgtcactc

SEQ ID NO: 102501 - DNA, 21 bp, Artificial Sequence
  primer
tgctaagaggaagttccaggg

SEQ ID NO: 102502 - DNA, 24 bp, Artificial Sequence
  primer
cactgtgaatttaccgtctgaatc

SEQ ID NO: 102503 - DNA, 38 bp, Artificial Sequence
  primer
gtaaaacgacggccagtaagacgctacaggtaatgccc

SEQ ID NO: 102504 - DNA, 21 bp, Artificial Sequence
  primer
tgggaaagatgaagggagaac

SEQ ID NO: 102505 - DNA, 21 bp, Artificial Sequence
  primer
cccaggataaagggcagagac

SEQ ID NO: 102506 - DNA, 21 bp, Artificial Sequence
  primer
gttcaaggaaagcaaggatgg

SEQ ID NO: 102507 - DNA, 20 bp, Artificial Sequence
  primer
ctgcagtccttccctcactg

SEQ ID NO: 102508 - DNA, 21 bp, Artificial Sequence
  primer
gcccttgaactcctggtagac

SEQ ID NO: 102509 - DNA, 21 bp, Artificial Sequence
  primer
ccttctcctccagcttcttcc

SEQ ID NO: 102510 - DNA, 38 bp, Artificial Sequence
  primer
gtaaaacgacggccagtttgggagtggatggaagtagg

SEQ ID NO: 102511 - DNA, 21 bp, Artificial Sequence
  primer
gaatactgcaggcccaatacc

SEQ ID NO: 102512 - DNA, 21 bp, Artificial Sequence
  primer
aattggaagccagctacaacc

SEQ ID NO: 102513 - DNA, 21 bp, Artificial Sequence
  primer
tacagggctgatgtgaggatg

SEQ ID NO: 102514 - DNA, 38 bp, Artificial Sequence
  primer
gtaaaacgacggccagtgaaacacaggaaggtgagcag

SEQ ID NO: 102515 - DNA, 21 bp, Artificial Sequence
  primer
cccataatcctggttgagtcc

SEQ ID NO: 102516 - DNA, 38 bp, Artificial Sequence
  primer
gtaaaacgacggccagttaggcaacgtctacaccaagc

SEQ ID NO: 102517 - DNA, 21 bp, Artificial Sequence
  primer
gaatacctggtggaccctgag

SEQ ID NO: 102518 - DNA, 39 bp, Artificial Sequence
  primer
gtaaaacgacggccagtaaacagaggagtgagaaatggc

SEQ ID NO: 102519 - DNA, 38 bp, Artificial Sequence
  primer
gtaaaacgacggccagttggagacttatgggatcaggg

SEQ ID NO: 102520 - DNA, 38 bp, Artificial Sequence
  primer
gtaaaacgacggccagttgcaaactgctgctctctctg

SEQ ID NO: 102521 - DNA, 21 bp, Artificial Sequence
  primer
tgagaggcacattgtctgatg

SEQ ID NO: 102522 - DNA, 39 bp, Artificial Sequence
  primer
gtaaaacgacggccagtgatggagacggtgatagtgagc

SEQ ID NO: 102523 - DNA, 21 bp, Artificial Sequence
  primer
tacgctgggtcctgtgtatcc

SEQ ID NO: 102524 - DNA, 21 bp, Artificial Sequence
  primer
agtggaagttccctcctcctg

SEQ ID NO: 102525 - DNA, 21 bp, Artificial Sequence
  primer
tcagagaacccgtgtcgttag

SEQ ID NO: 102526 - DNA, 38 bp, Artificial Sequence
  primer
gtaaaacgacggccagtgaagggcagagagtctcaagg

SEQ ID NO: 102527 - DNA, 37 bp, Artificial Sequence
  primer
gtaaaacgacggccagtgaccaatccacactgccaag

SEQ ID NO: 102528 - DNA, 22 bp, Artificial Sequence
  primer
aatcccaggtcctcctttgtag

SEQ ID NO: 102529 - DNA, 38 bp, Artificial Sequence
  primer
gtaaaacgacggccagttgcagccgaaacctaatcttc

SEQ ID NO: 102530 - DNA, 37 bp, Artificial Sequence
  primer
gtaaaacgacggccagtacccaaggacaggtagggtg

SEQ ID NO: 102531 - DNA, 38 bp, Artificial Sequence
  primer
gtaaaacgacggccagtcacttgggagcattacgtctg

SEQ ID NO: 102532 - DNA, 21 bp, Artificial Sequence
  primer
aatttcctgaaagcctgatgc

SEQ ID NO: 102533 - DNA, 20 bp, Artificial Sequence
  primer
actcccacctcagcacacac

SEQ ID NO: 102534 - DNA, 38 bp, Artificial Sequence
  primer
gtaaaacgacggccagtacttcggttctttccatcagg

SEQ ID NO: 102535 - DNA, 38 bp, Artificial Sequence
  primer
gtaaaacgacggccagtaccagcccttaccttaggtcc

SEQ ID NO: 102536 - DNA, 21 bp, Artificial Sequence
  primer
aggataggctgccatgtatgc

SEQ ID NO: 102537 - DNA, 38 bp, Artificial Sequence
  primer
gtaaaacgacggccagtccagggagcagaaccagttac

SEQ ID NO: 102538 - DNA, 37 bp, Artificial Sequence
  primer
gtaaaacgacggccagtacagcctatgcaccaccaac

SEQ ID NO: 102539 - DNA, 37 bp, Artificial Sequence
  primer
gtaaaacgacggccagtgaaggcgagatctttggagg

SEQ ID NO: 102540 - DNA, 21 bp, Artificial Sequence
  primer
cccagatatgttgtgctgtgc

SEQ ID NO: 102541 - DNA, 21 bp, Artificial Sequence
  primer
aacaatttccagagacagccc

SEQ ID NO: 102542 - DNA, 21 bp, Artificial Sequence
  primer
tgaactggagatttccttccc

SEQ ID NO: 102543 - DNA, 21 bp, Artificial Sequence
  primer
cagaatgtcagcaggagcttg

SEQ ID NO: 102544 - DNA, 38 bp, Artificial Sequence
  primer
gtaaaacgacggccagttgagagcaggaggacattgag

SEQ ID NO: 102545 - DNA, 21 bp, Artificial Sequence
  primer
cacctttggtaccaggcaatc

SEQ ID NO: 102546 - DNA, 38 bp, Artificial Sequence
  primer
gtaaaacgacggccagttgactggcctgtcgttatttg

SEQ ID NO: 102547 - DNA, 22 bp, Artificial Sequence
  primer
ttcacaacctgtcacagagtcc

SEQ ID NO: 102548 - DNA, 22 bp, Artificial Sequence
  primer
catggaaatgacaaccttcatc

SEQ ID NO: 102549 - DNA, 21 bp, Artificial Sequence
  primer
tcaaactggcgaattctgttg

SEQ ID NO: 102550 - DNA, 21 bp, Artificial Sequence
  primer
tctgccctgtgtcctgtgtag

SEQ ID NO: 102551 - DNA, 37 bp, Artificial Sequence
  primer
gtaaaacgacggccagtaaggtgaagggcagacacag

SEQ ID NO: 102552 - DNA, 21 bp, Artificial Sequence
  primer
gcaaaggcttatgacagcaag

SEQ ID NO: 102553 - DNA, 39 bp, Artificial Sequence
  primer
gtaaaacgacggccagtactctaagctcctcgaaagcag

SEQ ID NO: 102554 - DNA, 21 bp, Artificial Sequence
  primer
ggtccaattcacagaagaccc

SEQ ID NO: 102555 - DNA, 21 bp, Artificial Sequence
  primer
gagtccactctttgggtttgg

SEQ ID NO: 102556 - DNA, 38 bp, Artificial Sequence
  primer
gtaaaacgacggccagtggtcatccagctccaggatag

SEQ ID NO: 102557 - DNA, 21 bp, Artificial Sequence
  primer
agttctccctgtggttgaagg

SEQ ID NO: 102558 - DNA, 38 bp, Artificial Sequence
  primer
gtaaaacgacggccagtatgccttacaaggtgatgctg

SEQ ID NO: 102559 - DNA, 38 bp, Artificial Sequence
  primer
gtaaaacgacggccagtacaggcaggattactgcagag

SEQ ID NO: 102560 - DNA, 22 bp, Artificial Sequence
  primer
aaccaccttgctaggacatttg

SEQ ID NO: 102561 - DNA, 39 bp, Artificial Sequence
  primer
gtaaaacgacggccagtggtctccgaagacaatgaaatg

SEQ ID NO: 102562 - DNA, 38 bp, Artificial Sequence
  primer
gtaaaacgacggccagtagagtctggtggcttctgtgc

SEQ ID NO: 102563 - DNA, 21 bp, Artificial Sequence
  primer
attcacagattcctgcccttc

SEQ ID NO: 102564 - DNA, 21 bp, Artificial Sequence
  primer
ttggtcccacctacctctcag

SEQ ID NO: 102565 - DNA, 37 bp, Artificial Sequence
  primer
gtaaaacgacggccagtgtcatttgggctcattgctg

SEQ ID NO: 102566 - DNA, 21 bp, Artificial Sequence
  primer
acacacctgtcccatctgttg

SEQ ID NO: 102567 - DNA, 20 bp, Artificial Sequence
  primer
gtgtttcttacccacgctgc

SEQ ID NO: 102568 - DNA, 38 bp, Artificial Sequence
  primer
gtaaaacgacggccagtacaaggcctcacatacagcag

SEQ ID NO: 102569 - DNA, 21 bp, Artificial Sequence
  primer
agacagagtgaaggagggacg

SEQ ID NO: 102570 - DNA, 21 bp, Artificial Sequence
  primer
acagccctagtcttgactccc

SEQ ID NO: 102571 - DNA, 20 bp, Artificial Sequence
  primer
acatatcagggagcccaacc

SEQ ID NO: 102572 - DNA, 37 bp, Artificial Sequence
  primer
gtaaaacgacggccagtatgccctacaagggacaacc

SEQ ID NO: 102573 - DNA, 22 bp, Artificial Sequence
  primer
gaattctgtgtcttcaccaccc

SEQ ID NO: 102574 - DNA, 21 bp, Artificial Sequence
  primer
tcacaagttccctgaagggtt

SEQ ID NO: 102575 - DNA, 21 bp, Artificial Sequence
  primer
aagacggatctctccagggtc

SEQ ID NO: 102576 - DNA, 38 bp, Artificial Sequence
  primer
gtaaaacgacggccagtggccaacgtggaagtgtttac

SEQ ID NO: 102577 - DNA, 21 bp, Artificial Sequence
  primer
acgcacacacatgcctacatc

SEQ ID NO: 102578 - DNA, 21 bp, Artificial Sequence
  primer
ttggtggaggagaggaaactc

SEQ ID NO: 102579 - DNA, 21 bp, Artificial Sequence
  primer
aaagcaaggctcaggtttgtg

SEQ ID NO: 102580 - DNA, 21 bp, Artificial Sequence
  primer
catcgctgctaaatttccctc

SEQ ID NO: 102581 - DNA, 38 bp, Artificial Sequence
  primer
gtaaaacgacggccagtttaccaggttcagttcctgcc

SEQ ID NO: 102582 - DNA, 21 bp, Artificial Sequence
  primer
gacggttgtcattgctctctg

SEQ ID NO: 102583 - DNA, 38 bp, Artificial Sequence
  primer
gtaaaacgacggccagtagtggtaagctcggctctcac

SEQ ID NO: 102584 - DNA, 38 bp, Artificial Sequence
  primer
gtaaaacgacggccagtggagaacaggtgcgacttgac

SEQ ID NO: 102585 - DNA, 21 bp, Artificial Sequence
  primer
agcaggaagcctggtgagtag

SEQ ID NO: 102586 - DNA, 38 bp, Artificial Sequence
  primer
gtaaaacgacggccagtaggctgctgagttcctaatgg

SEQ ID NO: 102587 - DNA, 38 bp, Artificial Sequence
  primer
gtaaaacgacggccagtatgcacacactcaaccattcc

SEQ ID NO: 102588 - DNA, 38 bp, Artificial Sequence
  primer
gtaaaacgacggccagtggttgagtccgaaagaactgg

SEQ ID NO: 102589 - DNA, 38 bp, Artificial Sequence
  primer
gtaaaacgacggccagtcagcctcttctctctcccaag

SEQ ID NO: 102590 - DNA, 21 bp, Artificial Sequence
  primer
aggcagctcataggtcctagc

SEQ ID NO: 102591 - DNA, 21 bp, Artificial Sequence
  primer
tgtgatgataccacagctccc

SEQ ID NO: 102592 - DNA, 21 bp, Artificial Sequence
  primer
aaacgaggagatgaggctctg

SEQ ID NO: 102593 - DNA, 21 bp, Artificial Sequence
  primer
ctttgtccaaaggactctgcc

SEQ ID NO: 102594 - DNA, 20 bp, Artificial Sequence
  primer
aatcacagggaagttcacgc

SEQ ID NO: 102595 - DNA, 20 bp, Artificial Sequence
  primer
tgatgctggaccacacattg

SEQ ID NO: 102596 - DNA, 21 bp, Artificial Sequence
  primer
tagactgcccttgctaaagcc

SEQ ID NO: 102597 - DNA, 38 bp, Artificial Sequence
  primer
gtaaaacgacggccagtctgtccctttaagtgcctccc

SEQ ID NO: 102598 - DNA, 21 bp, Artificial Sequence
  primer
gattctgtcttcacagcctgg

SEQ ID NO: 102599 - DNA, 21 bp, Artificial Sequence
  primer
tgagactggtgtctctggagc

SEQ ID NO: 102600 - DNA, 37 bp, Artificial Sequence
  primer
gtaaaacgacggccagtggactgagggcacaggtagc

SEQ ID NO: 102601 - DNA, 21 bp, Artificial Sequence
  primer
aatttctcaggcttgctctgg

SEQ ID NO: 102602 - DNA, 21 bp, Artificial Sequence
  primer
tttcaccctctggagaccttg

SEQ ID NO: 102603 - DNA, 37 bp, Artificial Sequence
  primer
gtaaaacgacggccagtcattccacagctggacgaag

SEQ ID NO: 102604 - DNA, 37 bp, Artificial Sequence
  primer
gtaaaacgacggccagtcgagagtccttggctgtctg

SEQ ID NO: 102605 - DNA, 38 bp, Artificial Sequence
  primer
gtaaaacgacggccagtcactgagggctaagtgtgtcc

SEQ ID NO: 102606 - DNA, 39 bp, Artificial Sequence
  primer
gtaaaacgacggccagtggttacctggaacttgtcaggg

SEQ ID NO: 102607 - DNA, 35 bp, Artificial Sequence
  primer
gtaaaacgacggccagtacagctccgtccctgtcc

SEQ ID NO: 102608 - DNA, 21 bp, Artificial Sequence
  primer
agaaatggtatcgcagcttcc

SEQ ID NO: 102609 - DNA, 38 bp, Artificial Sequence
  primer
gtaaaacgacggccagtatagagggagctcttggagcc

SEQ ID NO: 102610 - DNA, 21 bp, Artificial Sequence
  primer
cacgtgccatatcacacacac

SEQ ID NO: 102611 - DNA, 36 bp, Artificial Sequence
  primer
gtaaaacgacggccagtgctgcttcccacagtggac

SEQ ID NO: 102612 - DNA, 38 bp, Artificial Sequence
  primer
gtaaaacgacggccagtagctcagctcactcccatgtc

SEQ ID NO: 102613 - DNA, 21 bp, Artificial Sequence
  primer
gagtgtcactggcaacaaagc

SEQ ID NO: 102614 - DNA, 21 bp, Artificial Sequence
  primer
accagcttgtcgtgtctgaag

SEQ ID NO: 102615 - DNA, 38 bp, Artificial Sequence
  primer
gtaaaacgacggccagtggtggagctgatacttctggg

SEQ ID NO: 102616 - DNA, 38 bp, Artificial Sequence
  primer
gtaaaacgacggccagttgggcgaacacagatagtcac

SEQ ID NO: 102617 - DNA, 36 bp, Artificial Sequence
  primer
gtaaaacgacggccagtgagatgaggtgaggaggcg

SEQ ID NO: 102618 - DNA, 21 bp, Artificial Sequence
  primer
agtccactcatcatcacaggg

SEQ ID NO: 102619 - DNA, 20 bp, Artificial Sequence
  primer
atggacagatggcaggagtg

SEQ ID NO: 102620 - DNA, 21 bp, Artificial Sequence
  primer
ctctgtgagtgagatgccagg

SEQ ID NO: 102621 - DNA, 38 bp, Artificial Sequence
  primer
gtaaaacgacggccagtcatctccgaagaacaagggtg

SEQ ID NO: 102622 - DNA, 21 bp, Artificial Sequence
  primer
aacgctggaagtctaggttgg

SEQ ID NO: 102623 - DNA, 37 bp, Artificial Sequence
  primer
gtaaaacgacggccagtcaaagcagtggcaggaagag

SEQ ID NO: 102624 - DNA, 19 bp, Artificial Sequence
  primer
acatggagacccagggacc

SEQ ID NO: 102625 - DNA, 38 bp, Artificial Sequence
  primer
gtaaaacgacggccagtgccctgagtctctgaggtcac

SEQ ID NO: 102626 - DNA, 21 bp, Artificial Sequence
  primer
ggaggtggagtgtagactggc

SEQ ID NO: 102627 - DNA, 21 bp, Artificial Sequence
  primer
agctctggcaccaggttactc

SEQ ID NO: 102628 - DNA, 21 bp, Artificial Sequence
  primer
acatcccactcccatcatttc

SEQ ID NO: 102629 - DNA, 19 bp, Artificial Sequence
  primer
tcctttcacgggaggtgac

SEQ ID NO: 102630 - DNA, 37 bp, Artificial Sequence
  primer
gtaaaacgacggccagtagccagaccctcaggaagac

SEQ ID NO: 102631 - DNA, 38 bp, Artificial Sequence
  primer
gtaaaacgacggccagtactgcactagggagatgagcc

SEQ ID NO: 102632 - DNA, 37 bp, Artificial Sequence
  primer
gtaaaacgacggccagtgtactgccagccacatccag

SEQ ID NO: 102633 - DNA, 21 bp, Artificial Sequence
  primer
ataagtggcctctgggaggag

SEQ ID NO: 102634 - DNA, 38 bp, Artificial Sequence
  primer
gtaaaacgacggccagtctggcacatcctagaaggacc

SEQ ID NO: 102635 - DNA, 20 bp, Artificial Sequence
  primer
agtctcactgctgctggcac

SEQ ID NO: 102636 - DNA, 38 bp, Artificial Sequence
  primer
gtaaaacgacggccagtcaaatccaggtcctatgaggc

SEQ ID NO: 102637 - DNA, 37 bp, Artificial Sequence
  primer
gtaaaacgacggccagtggacaggaacatcctgaggg

SEQ ID NO: 102638 - DNA, 18 bp, Artificial Sequence
  primer
ctgggacatgggctctgc

SEQ ID NO: 102639 - DNA, 38 bp, Artificial Sequence
  primer
gtaaaacgacggccagtgggcctaaaccctgatctgac

SEQ ID NO: 102640 - DNA, 37 bp, Artificial Sequence
  primer
gtaaaacgacggccagtaggagagaaaccaaggtggg

SEQ ID NO: 102641 - DNA, 38 bp, Artificial Sequence
  primer
gtaaaacgacggccagtgtgggagagtgtctctgaggg

SEQ ID NO: 102642 - DNA, 38 bp, Artificial Sequence
  primer
gtaaaacgacggccagtaagtttaagaagcgctggctg

SEQ ID NO: 102643 - DNA, 21 bp, Artificial Sequence
  primer
agcgctgagacagaggtagtg

SEQ ID NO: 102644 - DNA, 35 bp, Artificial Sequence
  primer
gtaaaacgacggccagtctgggccctcttctgctg

SEQ ID NO: 102645 - DNA, 21 bp, Artificial Sequence
  primer
ctaggcgccagtgtctgtaac

SEQ ID NO: 102646 - DNA, 38 bp, Artificial Sequence
  primer
gtaaaacgacggccagttcaaacgcattgctaatgatg

SEQ ID NO: 102647 - DNA, 20 bp, Artificial Sequence
  primer
aaagtatggcagccaggtcc

SEQ ID NO: 102648 - DNA, 35 bp, Artificial Sequence
  primer
gtaaaacgacggccagtacagtttgcaacgctggg

SEQ ID NO: 102649 - DNA, 21 bp, Artificial Sequence
  primer
agctcagctcactcccatgtc

SEQ ID NO: 102650 - DNA, 38 bp, Artificial Sequence
  primer
gtaaaacgacggccagtgcatcatgggaagatcaatgg

SEQ ID NO: 102651 - DNA, 43 bp, Artificial Sequence
  primer
gtaaaacgacggccagtttaaattgcagtatcaaagattcacc

SEQ ID NO: 102652 - DNA, 21 bp, Artificial Sequence
  primer
acacgtttaccactgcattcc

SEQ ID NO: 102653 - DNA, 41 bp, Artificial Sequence
  primer
gtaaaacgacggccagttttgtgcaccagttcaaataattc

SEQ ID NO: 102654 - DNA, 25 bp, Artificial Sequence
  primer
tgatgagaagggaatctattacaca

SEQ ID NO: 102655 - DNA, 38 bp, Artificial Sequence
  primer
gtaaaacgacggccagtcctggcttcaacagaacacac

SEQ ID NO: 102656 - DNA, 21 bp, Artificial Sequence
  primer
ctggaaggaagttcagatggg

SEQ ID NO: 102657 - DNA, 20 bp, Artificial Sequence
  primer
ttccaaagttcacaccagcc

SEQ ID NO: 102658 - DNA, 38 bp, Artificial Sequence
  primer
gtaaaacgacggccagtgcttcctcctagaatggtccc

SEQ ID NO: 102659 - DNA, 22 bp, Artificial Sequence
  primer
tctacctcaatggaagcaaatg

SEQ ID NO: 102660 - DNA, 21 bp, Artificial Sequence
  primer
aacactgggcctctactgagc

SEQ ID NO: 102661 - DNA, 21 bp, Artificial Sequence
  primer
tcatgctgttaagcaagggtg

SEQ ID NO: 102662 - DNA, 38 bp, Artificial Sequence
  primer
gtaaaacgacggccagtcatctgcttgctctatttcgg

SEQ ID NO: 102663 - DNA, 21 bp, Artificial Sequence
  primer
cctccctcatctcttggtttg

SEQ ID NO: 102664 - DNA, 23 bp, Artificial Sequence
  primer
tttgcattaacaatctttgaaca

SEQ ID NO: 102665 - DNA, 21 bp, Artificial Sequence
  primer
aacctgggaggtggaggttat

SEQ ID NO: 102666 - DNA, 38 bp, Artificial Sequence
  primer
gtaaaacgacggccagttttcccatgacaggatcaacc

SEQ ID NO: 102667 - DNA, 21 bp, Artificial Sequence
  primer
ccaatgttgaagtctccttgc

SEQ ID NO: 102668 - DNA, 21 bp, Artificial Sequence
  primer
tccaggttcaccctaaacacg

SEQ ID NO: 102669 - DNA, 38 bp, Artificial Sequence
  primer
gtaaaacgacggccagtatgcgtgtaataaatgcagcc

SEQ ID NO: 102670 - DNA, 38 bp, Artificial Sequence
  primer
gtaaaacgacggccagtgacccatgtctttgggaaatg

SEQ ID NO: 102671 - DNA, 21 bp, Artificial Sequence
  primer
tctgtacaatcccagaagccc

SEQ ID NO: 102672 - DNA, 26 bp, Artificial Sequence
  primer
ttattcccatacttgtgatctgaaac

SEQ ID NO: 102673 - DNA, 38 bp, Artificial Sequence
  primer
gtaaaacgacggccagttatcccttgtgggcctatgtc

SEQ ID NO: 102674 - DNA, 24 bp, Artificial Sequence
  primer
ttgtatttccgtctctgacctttc

SEQ ID NO: 102675 - DNA, 21 bp, Artificial Sequence
  primer
tacatcattccctggagtccc

SEQ ID NO: 102676 - DNA, 21 bp, Artificial Sequence
  primer
tggcttctgggtgcatttaag

SEQ ID NO: 102677 - DNA, 22 bp, Artificial Sequence
  primer
acacacacagaaatgctgatcc

SEQ ID NO: 102678 - DNA, 22 bp, Artificial Sequence
  primer
aactatcctaccagctgccctc

SEQ ID NO: 102679 - DNA, 39 bp, Artificial Sequence
  primer
gtaaaacgacggccagttggccctatatcaccctagaag

SEQ ID NO: 102680 - DNA, 22 bp, Artificial Sequence
  primer
cagggaacaaataaatggcaac

SEQ ID NO: 102681 - DNA, 39 bp, Artificial Sequence
  primer
gtaaaacgacggccagtaaccggacccttggtaataaac

SEQ ID NO: 102682 - DNA, 21 bp, Artificial Sequence
  primer
ctgagagcttggatgaggcta

SEQ ID NO: 102683 - DNA, 21 bp, Artificial Sequence
  primer
cctttggacctgtgttcttcc

SEQ ID NO: 102684 - DNA, 38 bp, Artificial Sequence
  primer
gtaaaacgacggccagtcattgcacattgaggctgaac

SEQ ID NO: 102685 - DNA, 38 bp, Artificial Sequence
  primer
gtaaaacgacggccagtactgggaacattcacacctcc

SEQ ID NO: 102686 - DNA, 22 bp, Artificial Sequence
  primer
ttggctgtattcataacatgcg

SEQ ID NO: 102687 - DNA, 21 bp, Artificial Sequence
  primer
aacctcaagggcagtgacaac

SEQ ID NO: 102688 - DNA, 22 bp, Artificial Sequence
  primer
cctgatcctccttaacccattc

SEQ ID NO: 102689 - DNA, 21 bp, Artificial Sequence
  primer
ctaatgccatgggagttatgg

SEQ ID NO: 102690 - DNA, 23 bp, Artificial Sequence
  primer
tggtccagggaaacctatatctc

SEQ ID NO: 102691 - DNA, 38 bp, Artificial Sequence
  primer
gtaaaacgacggccagtataagaactcctgcccttgcc

SEQ ID NO: 102692 - DNA, 36 bp, Artificial Sequence
  primer
gtaaaacgacggccagtcaggcttacccatgatgcc

SEQ ID NO: 102693 - DNA, 21 bp, Artificial Sequence
  primer
gatctttgatcgcctacaccc

SEQ ID NO: 102694 - DNA, 39 bp, Artificial Sequence
  primer
gtaaaacgacggccagtggcagtatcattgctttcattg

SEQ ID NO: 102695 - DNA, 38 bp, Artificial Sequence
  primer
gtaaaacgacggccagtagaatgttgctggagggattc

SEQ ID NO: 102696 - DNA, 25 bp, Artificial Sequence
  primer
agaataccaggtaactctcatttgg

SEQ ID NO: 102697 - DNA, 38 bp, Artificial Sequence
  primer
gtaaaacgacggccagtctagccaacatggatcactcg

SEQ ID NO: 102698 - DNA, 21 bp, Artificial Sequence
  primer
tttaatgcctggcttactccc

SEQ ID NO: 102699 - DNA, 21 bp, Artificial Sequence
  primer
tcatcatctcccttccattcc

SEQ ID NO: 102700 - DNA, 21 bp, Artificial Sequence
  primer
aaggtttgctaatgctgctcc

SEQ ID NO: 102701 - DNA, 38 bp, Artificial Sequence
  primer
gtaaaacgacggccagtaggccaggttagagaagggag

SEQ ID NO: 102702 - DNA, 21 bp, Artificial Sequence
  primer
caaggcctctccacttactcc

SEQ ID NO: 102703 - DNA, 22 bp, Artificial Sequence
  primer
acatgtcacaaactgtgaaggg

SEQ ID NO: 102704 - DNA, 21 bp, Artificial Sequence
  primer
tagtcattcatgcctgttggg

SEQ ID NO: 102705 - DNA, 21 bp, Artificial Sequence
  primer
ccctgtcaaccttctccaatc

SEQ ID NO: 102706 - DNA, 20 bp, Artificial Sequence
  primer
ctgggattgaagggaagagg

SEQ ID NO: 102707 - DNA, 38 bp, Artificial Sequence
  primer
gtaaaacgacggccagtgtggagtggaaattgcaggac

SEQ ID NO: 102708 - DNA, 38 bp, Artificial Sequence
  primer
gtaaaacgacggccagtacatcactgtggacccagctc

SEQ ID NO: 102709 - DNA, 38 bp, Artificial Sequence
  primer
gtaaaacgacggccagtcgtttaatcgggactgctttc

SEQ ID NO: 102710 - DNA, 21 bp, Artificial Sequence
  primer
cactcaccatctgaccaggag

SEQ ID NO: 102711 - DNA, 21 bp, Artificial Sequence
  primer
agtacttacagcagggccagg

SEQ ID NO: 102712 - DNA, 21 bp, Artificial Sequence
  primer
tagcaccatcatttccacgag

SEQ ID NO: 102713 - DNA, 38 bp, Artificial Sequence
  primer
gtaaaacgacggccagttgaaatggagatgtcagcgag

SEQ ID NO: 102714 - DNA, 21 bp, Artificial Sequence
  primer
gatcagagacggagaacccag

SEQ ID NO: 102715 - DNA, 22 bp, Artificial Sequence
  primer
ggcacagagaaaggagtgtcag

SEQ ID NO: 102716 - DNA, 21 bp, Artificial Sequence
  primer
tactcacgctgttacccttgg

SEQ ID NO: 102717 - DNA, 21 bp, Artificial Sequence
  primer
gggagaagaggatgagctgag

SEQ ID NO: 102718 - DNA, 38 bp, Artificial Sequence
  primer
gtaaaacgacggccagttcctttctggatttccctcag

SEQ ID NO: 102719 - DNA, 20 bp, Artificial Sequence
  primer
aggagaggaggccagtgaac

SEQ ID NO: 102720 - DNA, 37 bp, Artificial Sequence
  primer
gtaaaacgacggccagtaggagaaccacgttcaccag

SEQ ID NO: 102721 - DNA, 37 bp, Artificial Sequence
  primer
gtaaaacgacggccagtctgatccagaacgcctcatc

SEQ ID NO: 102722 - DNA, 20 bp, Artificial Sequence
  primer
acgaaagcagcagtgaggac

SEQ ID NO: 102723 - DNA, 38 bp, Artificial Sequence
  primer
gtaaaacgacggccagtgaggctgaggtccagaaagtg

SEQ ID NO: 102724 - DNA, 20 bp, Artificial Sequence
  primer
ctctccatctttgccagcag

SEQ ID NO: 102725 - DNA, 19 bp, Artificial Sequence
  primer
gttcacctctctcgccagc

SEQ ID NO: 102726 - DNA, 38 bp, Artificial Sequence
  primer
gtaaaacgacggccagtgtctgattagctaggagcggg

SEQ ID NO: 102727 - DNA, 21 bp, Artificial Sequence
  primer
ccagactagcaatcatgcagc

SEQ ID NO: 102728 - DNA, 38 bp, Artificial Sequence
  primer
gtaaaacgacggccagttctctcgccctagaagggaag

SEQ ID NO: 102729 - DNA, 38 bp, Artificial Sequence
  primer
gtaaaacgacggccagtcctatctccatggctttggtc

SEQ ID NO: 102730 - DNA, 21 bp, Artificial Sequence
  primer
acagggagaggattcatcagc

SEQ ID NO: 102731 - DNA, 21 bp, Artificial Sequence
  primer
gttgacagctcagtttggcag

SEQ ID NO: 102732 - DNA, 21 bp, Artificial Sequence
  primer
ctgacgcctttgtcctcattc

SEQ ID NO: 102733 - DNA, 38 bp, Artificial Sequence
  primer
gtaaaacgacggccagtctgacgcctttgtcctcattc

SEQ ID NO: 102734 - DNA, 21 bp, Artificial Sequence
  primer
aggagcaccaacattaccctg

SEQ ID NO: 102735 - DNA, 21 bp, Artificial Sequence
  primer
aaaccagtagcaccctggaag

SEQ ID NO: 102736 - DNA, 38 bp, Artificial Sequence
  primer
gtaaaacgacggccagtttccctggatgaggataggag

SEQ ID NO: 102737 - DNA, 21 bp, Artificial Sequence
  primer
gagtaccaggagcaccctttg

SEQ ID NO: 102738 - DNA, 21 bp, Artificial Sequence
  primer
accaaatctgttctccttggc

SEQ ID NO: 102739 - DNA, 20 bp, Artificial Sequence
  primer
aggagaaccgtctcgtccag

SEQ ID NO: 102740 - DNA, 38 bp, Artificial Sequence
  primer
gtaaaacgacggccagttcaccacgatcaccactcttg

SEQ ID NO: 102741 - DNA, 21 bp, Artificial Sequence
  primer
attaaggccctgacatcttgc

SEQ ID NO: 102742 - DNA, 21 bp, Artificial Sequence
  primer
ctgtctcacccttgtcaccac

SEQ ID NO: 102743 - DNA, 38 bp, Artificial Sequence
  primer
gtaaaacgacggccagtatgcccacaaatcttcagacc

SEQ ID NO: 102744 - DNA, 20 bp, Artificial Sequence
  primer
cctgtccctgaacccttctc

SEQ ID NO: 102745 - DNA, 21 bp, Artificial Sequence
  primer
caggaagctgaagtcgaaacc

SEQ ID NO: 102746 - DNA, 38 bp, Artificial Sequence
  primer
gtaaaacgacggccagtcaagatggagtcagggaaagg

SEQ ID NO: 102747 - DNA, 38 bp, Artificial Sequence
  primer
gtaaaacgacggccagttccaggacttcatgtcccttc

SEQ ID NO: 102748 - DNA, 38 bp, Artificial Sequence
  primer
gtaaaacgacggccagtacgtgggagtgatggagagag

SEQ ID NO: 102749 - DNA, 21 bp, Artificial Sequence
  primer
gtccatgtgaaattgtctccc

SEQ ID NO: 102750 - DNA, 20 bp, Artificial Sequence
  primer
ctgagagtctgccctccaag

SEQ ID NO: 102751 - DNA, 38 bp, Artificial Sequence
  primer
gtaaaacgacggccagttttctaaggcagccagaaagg

SEQ ID NO: 102752 - DNA, 47 bp, Artificial Sequence
  primer
gtaaaacgacggccagtaattacagatgattccagaagataattaaa

SEQ ID NO: 102753 - DNA, 39 bp, Artificial Sequence
  primer
gtaaaacgacggccagtgcttcttctgcagtgcattacc

SEQ ID NO: 102754 - DNA, 22 bp, Artificial Sequence
  primer
cctgtaattgacaagggctcac

SEQ ID NO: 102755 - DNA, 39 bp, Artificial Sequence
  primer
gtaaaacgacggccagtggtagctaaataaatggcgtgg

SEQ ID NO: 102756 - DNA, 21 bp, Artificial Sequence
  primer
caggtccttggaaaccttgag

SEQ ID NO: 102757 - DNA, 21 bp, Artificial Sequence
  primer
tacatcttcaccagccttgcc

SEQ ID NO: 102758 - DNA, 40 bp, Artificial Sequence
  primer
gtaaaacgacggccagtttctgtcaggcatattcagcttt

SEQ ID NO: 102759 - DNA, 41 bp, Artificial Sequence
  primer
gtaaaacgacggccagttgagtttgggtgacatctatgttg

SEQ ID NO: 102760 - DNA, 27 bp, Artificial Sequence
  primer
ccactttactttcaagaaatctgactc

SEQ ID NO: 102761 - DNA, 21 bp, Artificial Sequence
  primer
ccatccttgagggatttgaag

SEQ ID NO: 102762 - DNA, 38 bp, Artificial Sequence
  primer
gtaaaacgacggccagtcaggcatcatttgctttgttc

SEQ ID NO: 102763 - DNA, 38 bp, Artificial Sequence
  primer
gtaaaacgacggccagtatgaagaagacagcacccacc

SEQ ID NO: 102764 - DNA, 38 bp, Artificial Sequence
  primer
gtaaaacgacggccagtcattcatggtatccagggtgg

SEQ ID NO: 102765 - DNA, 40 bp, Artificial Sequence
  primer
gtaaaacgacggccagttgcaaacacagttccaatctttc

SEQ ID NO: 102766 - DNA, 22 bp, Artificial Sequence
  primer
tttgctccaggattaccctatg

SEQ ID NO: 102767 - DNA, 21 bp, Artificial Sequence
  primer
tagggaggtgatgggctgtag

SEQ ID NO: 102768 - DNA, 21 bp, Artificial Sequence
  primer
tgtgcatatagcagacgggag

SEQ ID NO: 102769 - DNA, 21 bp, Artificial Sequence
  primer
ctttccttcttcaccactggg

SEQ ID NO: 102770 - DNA, 21 bp, Artificial Sequence
  primer
aaggcagatggaaagcagatg

SEQ ID NO: 102771 - DNA, 21 bp, Artificial Sequence
  primer
cacttgcaccacgactaccag

SEQ ID NO: 102772 - DNA, 41 bp, Artificial Sequence
  primer
gtaaaacgacggccagtaaatgcaactgtcagcaagactac

SEQ ID NO: 102773 - DNA, 21 bp, Artificial Sequence
  primer
tgcattcccagatgatgtatg

SEQ ID NO: 102774 - DNA, 21 bp, Artificial Sequence
  primer
aagatgtccctgtgtctgtgg

SEQ ID NO: 102775 - DNA, 27 bp, Artificial Sequence
  primer
tttataaaggccagagaatgctactac

SEQ ID NO: 102776 - DNA, 21 bp, Artificial Sequence
  primer
gacttacctggaagcctggag

SEQ ID NO: 102777 - DNA, 21 bp, Artificial Sequence
  primer
gggtggtggctaccaaatatc

SEQ ID NO: 102778 - DNA, 21 bp, Artificial Sequence
  primer
gctcattctctccatcagcac

SEQ ID NO: 102779 - DNA, 22 bp, Artificial Sequence
  primer
gagccactgtcacaaatgtagc

SEQ ID NO: 102780 - DNA, 39 bp, Artificial Sequence
  primer
gtaaaacgacggccagtggaatcggattgctgtttactg

SEQ ID NO: 102781 - DNA, 21 bp, Artificial Sequence
  primer
aaatgctaccagaccacctgc

SEQ ID NO: 102782 - DNA, 22 bp, Artificial Sequence
  primer
tcatagacccaggagagaaagg

SEQ ID NO: 102783 - DNA, 38 bp, Artificial Sequence
  primer
gtaaaacgacggccagtcacagcatttgtttcctgctg

SEQ ID NO: 102784 - DNA, 21 bp, Artificial Sequence
  primer
ctctggtattccgacccactc

SEQ ID NO: 102785 - DNA, 21 bp, Artificial Sequence
  primer
ctctggtattccgacccactc

SEQ ID NO: 102786 - DNA, 21 bp, Artificial Sequence
  primer
ctgttgcatagcaggcacttg

SEQ ID NO: 102787 - DNA, 22 bp, Artificial Sequence
  primer
gcaacatacactgagttccagc

SEQ ID NO: 102788 - DNA, 23 bp, Artificial Sequence
  primer
ttcagaccaggagagtaatagcg

SEQ ID NO: 102789 - DNA, 38 bp, Artificial Sequence
  primer
gtaaaacgacggccagtggacagatttcctggctcaac

SEQ ID NO: 102790 - DNA, 37 bp, Artificial Sequence
  primer
gtaaaacgacggccagtgtcacatttgaagtggcagc

SEQ ID NO: 102791 - DNA, 22 bp, Artificial Sequence
  primer
tttggaagaagagaacctcagc

SEQ ID NO: 102792 - DNA, 37 bp, Artificial Sequence
  primer
gtaaaacgacggccagtgtttccatgtttgccagcag

SEQ ID NO: 102793 - DNA, 21 bp, Artificial Sequence
  primer
ttagctaggcccaagataccc

SEQ ID NO: 102794 - DNA, 21 bp, Artificial Sequence
  primer
tcacctctgctggtaatctgc

SEQ ID NO: 102795 - DNA, 37 bp, Artificial Sequence
  primer
gtaaaacgacggccagtagccagagaatgggaaatgg

SEQ ID NO: 102796 - DNA, 38 bp, Artificial Sequence
  primer
gtaaaacgacggccagtctgtaccaggatgtccagtgc

SEQ ID NO: 102797 - DNA, 21 bp, Artificial Sequence
  primer
gggttgtcaaagttgtcttgg

SEQ ID NO: 102798 - DNA, 37 bp, Artificial Sequence
  primer
gtaaaacgacggccagtgtgctggttgggagaagatg

SEQ ID NO: 102799 - DNA, 21 bp, Artificial Sequence
  primer
attggaacccaggaaaggaac

SEQ ID NO: 102800 - DNA, 44 bp, Artificial Sequence
  primer
gtaaaacgacggccagtgttagttctctcattcttctgttcttt

SEQ ID NO: 102801 - DNA, 23 bp, Artificial Sequence
  primer
ttgcccacaatttaagcaagtag

SEQ ID NO: 102802 - DNA, 38 bp, Artificial Sequence
  primer
gtaaaacgacggccagttcagcacgcattcaacttagg

SEQ ID NO: 102803 - DNA, 20 bp, Artificial Sequence
  primer
agagaccaaggccagagagg

SEQ ID NO: 102804 - DNA, 38 bp, Artificial Sequence
  primer
gtaaaacgacggccagtactgcttcacacatacccacc

SEQ ID NO: 102805 - DNA, 20 bp, Artificial Sequence
  primer
gaagaacttcctggcctcgt

SEQ ID NO: 102806 - DNA, 37 bp, Artificial Sequence
  primer
gtaaaacgacggccagtacaggtcacagcctcctctg

SEQ ID NO: 102807 - DNA, 22 bp, Artificial Sequence
  primer
ccacttggagctcgatttacac

SEQ ID NO: 102808 - DNA, 18 bp, Artificial Sequence
  primer
gtgccgcagatgtggaag

SEQ ID NO: 102809 - DNA, 23 bp, Artificial Sequence
  primer
gcccttctgtggacagatgtaag

SEQ ID NO: 102810 - DNA, 37 bp, Artificial Sequence
  primer
gtaaaacgacggccagtttattcctgccctccctttg

SEQ ID NO: 102811 - DNA, 38 bp, Artificial Sequence
  primer
gtaaaacgacggccagttgggtggttaagatccagagc

SEQ ID NO: 102812 - DNA, 37 bp, Artificial Sequence
  primer
gtaaaacgacggccagtcatagtccctgccaggttcc

SEQ ID NO: 102813 - DNA, 19 bp, Artificial Sequence
  primer
gagaagcccaggtgtctcg

SEQ ID NO: 102814 - DNA, 38 bp, Artificial Sequence
  primer
gtaaaacgacggccagtttatctgatggttggctccac

SEQ ID NO: 102815 - DNA, 39 bp, Artificial Sequence
  primer
gtaaaacgacggccagttgatgtgaactgtctagcaggg

SEQ ID NO: 102816 - DNA, 21 bp, Artificial Sequence
  primer
gctctgagccctagactttgg

SEQ ID NO: 102817 - DNA, 38 bp, Artificial Sequence
  primer
gtaaaacgacggccagtttctgggagtctagggtcctg

SEQ ID NO: 102818 - DNA, 37 bp, Artificial Sequence
  primer
gtaaaacgacggccagtcaggaccctgtacttcgtgg

SEQ ID NO: 102819 - DNA, 21 bp, Artificial Sequence
  primer
gttggatgagtctggagctgg

SEQ ID NO: 102820 - DNA, 21 bp, Artificial Sequence
  primer
cttacataaccttcggctccc

SEQ ID NO: 102821 - DNA, 21 bp, Artificial Sequence
  primer
gtcagccgtttgctgacatag

SEQ ID NO: 102822 - DNA, 35 bp, Artificial Sequence
  primer
gtaaaacgacggccagtgcctggaggctggacttc

SEQ ID NO: 102823 - DNA, 21 bp, Artificial Sequence
  primer
ctcctagggagaggagttggc

SEQ ID NO: 102824 - DNA, 21 bp, Artificial Sequence
  primer
cagcatctggagctgaaactg

SEQ ID NO: 102825 - DNA, 38 bp, Artificial Sequence
  primer
gtaaaacgacggccagtaatctggacaggccaactgac

SEQ ID NO: 102826 - DNA, 37 bp, Artificial Sequence
  primer
gtaaaacgacggccagtgattccgcactagaggaggg

SEQ ID NO: 102827 - DNA, 20 bp, Artificial Sequence
  primer
tccctgcactctcaggaatg

SEQ ID NO: 102828 - DNA, 20 bp, Artificial Sequence
  primer
ccctgacagaaccctccaag

SEQ ID NO: 102829 - DNA, 38 bp, Artificial Sequence
  primer
gtaaaacgacggccagtaacacaccctgtaacccaagc

SEQ ID NO: 102830 - DNA, 38 bp, Artificial Sequence
  primer
gtaaaacgacggccagttgcagaaagttccagcagaag

SEQ ID NO: 102831 - DNA, 21 bp, Artificial Sequence
  primer
caacaggaagtccctaggtgg

SEQ ID NO: 102832 - DNA, 21 bp, Artificial Sequence
  primer
ctcacaagctggtagagggtg

SEQ ID NO: 102833 - DNA, 38 bp, Artificial Sequence
  primer
gtaaaacgacggccagtgtgtgctaacgatgggtgaag

SEQ ID NO: 102834 - DNA, 38 bp, Artificial Sequence
  primer
gtaaaacgacggccagtgtgctgacacagattgaagcc

SEQ ID NO: 102835 - DNA, 23 bp, Artificial Sequence
  primer
tccatagttgaccctactttccc

SEQ ID NO: 102836 - DNA, 38 bp, Artificial Sequence
  primer
gtaaaacgacggccagtccagactgtttgttccaaagc

SEQ ID NO: 102837 - DNA, 38 bp, Artificial Sequence
  primer
gtaaaacgacggccagtaaggtaatcgagcgcaaactg

SEQ ID NO: 102838 - DNA, 23 bp, Artificial Sequence
  primer
aagtttctgcttcatcacttccc

SEQ ID NO: 102839 - DNA, 21 bp, Artificial Sequence
  primer
atgatggaggaagaccttctg

SEQ ID NO: 102840 - DNA, 38 bp, Artificial Sequence
  primer
gtaaaacgacggccagtcccaacacacataaacccaat

SEQ ID NO: 102841 - DNA, 26 bp, Artificial Sequence
  primer
aatttcactaatgaactgaccacatt

SEQ ID NO: 102842 - DNA, 24 bp, Artificial Sequence
  primer
tgcttcatgtaacttcacttccac

SEQ ID NO: 102843 - DNA, 40 bp, Artificial Sequence
  primer
gtaaaacgacggccagtcccaataggaaattccaaatcac

SEQ ID NO: 102844 - DNA, 23 bp, Artificial Sequence
  primer
caacaggatcaatggtgattagg

SEQ ID NO: 102845 - DNA, 21 bp, Artificial Sequence
  primer
tagctcctttcgttccaacag

SEQ ID NO: 102846 - DNA, 39 bp, Artificial Sequence
  primer
gtaaaacgacggccagtcctcgagctccctaaattaacc

SEQ ID NO: 102847 - DNA, 21 bp, Artificial Sequence
  primer
atagggcaatgccaaagtctg

SEQ ID NO: 102848 - DNA, 28 bp, Artificial Sequence
  primer
ttataactggaaactttaaagggaattt

SEQ ID NO: 102849 - DNA, 23 bp, Artificial Sequence
  primer
gagctaactgttctaatgctggg

SEQ ID NO: 102850 - DNA, 21 bp, Artificial Sequence
  primer
tccatgtcttcctggttctcc

SEQ ID NO: 102851 - DNA, 25 bp, Artificial Sequence
  primer
aagggtttattgaagaagttcaacc

SEQ ID NO: 102852 - DNA, 42 bp, Artificial Sequence
  primer
gtaaaacgacggccagtggaagtcactgaacaaataataggg

SEQ ID NO: 102853 - DNA, 26 bp, Artificial Sequence
  primer
aagtaacaaagtaaaggaggaagcat

SEQ ID NO: 102854 - DNA, 39 bp, Artificial Sequence
  primer
gtaaaacgacggccagtcagaatggaattcatggacctc

SEQ ID NO: 102855 - DNA, 21 bp, Artificial Sequence
  primer
aggagattctggaccctttcc

SEQ ID NO: 102856 - DNA, 42 bp, Artificial Sequence
  primer
gtaaaacgacggccagtggaccagaaagtaagttcatgtttg

SEQ ID NO: 102857 - DNA, 21 bp, Artificial Sequence
  primer
ctgcaacagcaaagtggtgag

SEQ ID NO: 102858 - DNA, 42 bp, Artificial Sequence
  primer
gtaaaacgacggccagtcaagtaatcctctctcagcattgtc

SEQ ID NO: 102859 - DNA, 21 bp, Artificial Sequence
  primer
ttcagctccaagtctggaaga

SEQ ID NO: 102860 - DNA, 38 bp, Artificial Sequence
  primer
gtaaaacgacggccagttccctgcatcaaagtgttagg

SEQ ID NO: 102861 - DNA, 44 bp, Artificial Sequence
  primer
gtaaaacgacggccagtagatgaggcttataaatgttatctgtt

SEQ ID NO: 102862 - DNA, 45 bp, Artificial Sequence
  primer
gtaaaacgacggccagttcgactattaaatggatatagggtatga

SEQ ID NO: 102863 - DNA, 44 bp, Artificial Sequence
  primer
gtaaaacgacggccagtcagatgtctcagtttcaatttatttca

SEQ ID NO: 102864 - DNA, 39 bp, Artificial Sequence
  primer
gtaaaacgacggccagttggttatcttcctgagatgcaa

SEQ ID NO: 102865 - DNA, 38 bp, Artificial Sequence
  primer
gtaaaacgacggccagtaactcacttgcatgcacacac

SEQ ID NO: 102866 - DNA, 37 bp, Artificial Sequence
  primer
gtaaaacgacggccagtctccagctcctccttgagtg

SEQ ID NO: 102867 - DNA, 35 bp, Artificial Sequence
  primer
gtaaaacgacggccagtctatctgcccgaggaccc

SEQ ID NO: 102868 - DNA, 20 bp, Artificial Sequence
  primer
acctgcacgattcaaaccac

SEQ ID NO: 102869 - DNA, 38 bp, Artificial Sequence
  primer
gtaaaacgacggccagttcggtgccaagtatgaaacag

SEQ ID NO: 102870 - DNA, 37 bp, Artificial Sequence
  primer
gtaaaacgacggccagtcagggataagagccctggag

SEQ ID NO: 102871 - DNA, 21 bp, Artificial Sequence
  primer
acactgagggcacttagctcc

SEQ ID NO: 102872 - DNA, 21 bp, Artificial Sequence
  primer
gatggtggatgtctccctgac

SEQ ID NO: 102873 - DNA, 21 bp, Artificial Sequence
  primer
acatgcatgatgggaaactcc

SEQ ID NO: 102874 - DNA, 21 bp, Artificial Sequence
  primer
atattagcaaggcagcatccc

SEQ ID NO: 102875 - DNA, 38 bp, Artificial Sequence
  primer
gtaaaacgacggccagtacttgctgatttgcatgatcg

SEQ ID NO: 102876 - DNA, 21 bp, Artificial Sequence
  primer
tacatgcttcaaccacccaag

SEQ ID NO: 102877 - DNA, 38 bp, Artificial Sequence
  primer
gtaaaacgacggccagtaggctgagctcctggtatctg

SEQ ID NO: 102878 - DNA, 20 bp, Artificial Sequence
  primer
aagcaactggctttgcactg

SEQ ID NO: 102879 - DNA, 21 bp, Artificial Sequence
  primer
ccaacacttcattggcatcag

SEQ ID NO: 102880 - DNA, 21 bp, Artificial Sequence
  primer
taacactgtctgcatcagccc

SEQ ID NO: 102881 - DNA, 38 bp, Artificial Sequence
  primer
gtaaaacgacggccagtgctctgtggagctttatgtgg

SEQ ID NO: 102882 - DNA, 21 bp, Artificial Sequence
  primer
ttatgtgagttcctgatgccc

SEQ ID NO: 102883 - DNA, 21 bp, Artificial Sequence
  primer
tgaaagccttctatccaaccc

SEQ ID NO: 102884 - DNA, 38 bp, Artificial Sequence
  primer
gtaaaacgacggccagtggcaactgaagtctgaaaggc

SEQ ID NO: 102885 - DNA, 21 bp, Artificial Sequence
  primer
acaacagcacaacccactcag

SEQ ID NO: 102886 - DNA, 37 bp, Artificial Sequence
  primer
gtaaaacgacggccagtatctccatgtccctgaagcc

SEQ ID NO: 102887 - DNA, 20 bp, Artificial Sequence
  primer
acacaggacagcacaggagg

SEQ ID NO: 102888 - DNA, 20 bp, Artificial Sequence
  primer
aggtcggagagtccagaagc

SEQ ID NO: 102889 - DNA, 21 bp, Artificial Sequence
  primer
cctcagctctaggaaagtggc

SEQ ID NO: 102890 - DNA, 21 bp, Artificial Sequence
  primer
gaatcctgatcgaagacccag

SEQ ID NO: 102891 - DNA, 21 bp, Artificial Sequence
  primer
ggtcccagctgatatagacgc

SEQ ID NO: 102892 - DNA, 20 bp, Artificial Sequence
  primer
ctgggaagccctctcctatg

SEQ ID NO: 102893 - DNA, 21 bp, Artificial Sequence
  primer
ccagctcaaggacccaagtag

SEQ ID NO: 102894 - DNA, 19 bp, Artificial Sequence
  primer
actcccgcttggatgacag

SEQ ID NO: 102895 - DNA, 24 bp, Artificial Sequence
  primer
ggtttgtaggacctaggaataggc

SEQ ID NO: 102896 - DNA, 38 bp, Artificial Sequence
  primer
gtaaaacgacggccagttgagaggtgacttctaggccc

SEQ ID NO: 102897 - DNA, 37 bp, Artificial Sequence
  primer
gtaaaacgacggccagttcctgaggagaagaaagggc

SEQ ID NO: 102898 - DNA, 21 bp, Artificial Sequence
  primer
acagagtagggacatccaggg

SEQ ID NO: 102899 - DNA, 21 bp, Artificial Sequence
  primer
tagagcagagcagacactggg

SEQ ID NO: 102900 - DNA, 38 bp, Artificial Sequence
  primer
gtaaaacgacggccagtggtggtctatgtcaggacagc

SEQ ID NO: 102901 - DNA, 21 bp, Artificial Sequence
  primer
ataaatgagccaatgggatgg

SEQ ID NO: 102902 - DNA, 21 bp, Artificial Sequence
  primer
agcctgtctcatccatctctg

SEQ ID NO: 102903 - DNA, 21 bp, Artificial Sequence
  primer
gactgaggtaaccggagatgc

SEQ ID NO: 102904 - DNA, 21 bp, Artificial Sequence
  primer
ccttgtctgggatcttcttcc

SEQ ID NO: 102905 - DNA, 35 bp, Artificial Sequence
  primer
gtaaaacgacggccagttctgcaggcaggtccaac

SEQ ID NO: 102906 - DNA, 22 bp, Artificial Sequence
  primer
tcataggttggacagtctgcac

SEQ ID NO: 102907 - DNA, 37 bp, Artificial Sequence
  primer
gtaaaacgacggccagtgaaatcctcaaccgggctac

SEQ ID NO: 102908 - DNA, 38 bp, Artificial Sequence
  primer
gtaaaacgacggccagtaaccggcataatggtggtaac

SEQ ID NO: 102909 - DNA, 21 bp, Artificial Sequence
  primer
atgtgaccagtggctgttgtg

SEQ ID NO: 102910 - DNA, 38 bp, Artificial Sequence
  primer
gtaaaacgacggccagtaacaccttcagaggcagatgg

SEQ ID NO: 102911 - DNA, 38 bp, Artificial Sequence
  primer
gtaaaacgacggccagttacactggccatcactcttcc

SEQ ID NO: 102912 - DNA, 38 bp, Artificial Sequence
  primer
gtaaaacgacggccagtttgtacaatggaagccacctg

SEQ ID NO: 102913 - DNA, 38 bp, Artificial Sequence
  primer
gtaaaacgacggccagttaccatgcctggtgagttgag

SEQ ID NO: 102914 - DNA, 38 bp, Artificial Sequence
  primer
gtaaaacgacggccagtagagcagaattggcaaacacc

SEQ ID NO: 102915 - DNA, 26 bp, Artificial Sequence
  primer
caaataagaaacaaccaatatacgcc

SEQ ID NO: 102916 - DNA, 22 bp, Artificial Sequence
  primer
tgcctatcttcgagactggttc

SEQ ID NO: 102917 - DNA, 21 bp, Artificial Sequence
  primer
gtgtggcaaagctgaattgac

SEQ ID NO: 102918 - DNA, 21 bp, Artificial Sequence
  primer
gcaggctgcaagtatcttctg

SEQ ID NO: 102919 - DNA, 38 bp, Artificial Sequence
  primer
gtaaaacgacggccagttgtcatctgtgtgcctcttgg

SEQ ID NO: 102920 - DNA, 38 bp, Artificial Sequence
  primer
gtaaaacgacggccagtgtggcaccagagggaactaac

SEQ ID NO: 102921 - DNA, 21 bp, Artificial Sequence
  primer
ccactcaaacccatatgtccc

SEQ ID NO: 102922 - DNA, 37 bp, Artificial Sequence
  primer
gtaaaacgacggccagtatcatggcctgagcagacag

SEQ ID NO: 102923 - DNA, 39 bp, Artificial Sequence
  primer
gtaaaacgacggccagtagagtgttaaggcaagtgtggg

SEQ ID NO: 102924 - DNA, 21 bp, Artificial Sequence
  primer
tccaggcgggtgtttactaac

SEQ ID NO: 102925 - DNA, 21 bp, Artificial Sequence
  primer
tgaagtccacacacttccctg

SEQ ID NO: 102926 - DNA, 21 bp, Artificial Sequence
  primer
ggacagaacagtcttcagggc

SEQ ID NO: 102927 - DNA, 21 bp, Artificial Sequence
  primer
tgtagagcctaagccctcctc

SEQ ID NO: 102928 - DNA, 20 bp, Artificial Sequence
  primer
ttcaagacctctggcttccc

SEQ ID NO: 102929 - DNA, 18 bp, Artificial Sequence
  primer
ccagagacctgcacgctg

SEQ ID NO: 102930 - DNA, 37 bp, Artificial Sequence
  primer
gtaaaacgacggccagtgaagacgacagcctgacacc

SEQ ID NO: 102931 - DNA, 20 bp, Artificial Sequence
  primer
ggaaaggcagtactgggtgc

SEQ ID NO: 102932 - DNA, 21 bp, Artificial Sequence
  primer
tgaggacacacctccctaacc

SEQ ID NO: 102933 - DNA, 21 bp, Artificial Sequence
  primer
atctgtgcagcctttacctcc

SEQ ID NO: 102934 - DNA, 37 bp, Artificial Sequence
  primer
gtaaaacgacggccagtaagttccagtggctgcttcc

SEQ ID NO: 102935 - DNA, 21 bp, Artificial Sequence
  primer
agactcaactctctgggcagg

SEQ ID NO: 102936 - DNA, 21 bp, Artificial Sequence
  primer
tcttggcctctttctgtgatg

SEQ ID NO: 102937 - DNA, 38 bp, Artificial Sequence
  primer
gtaaaacgacggccagtgttaagtttgggcccaggttc

SEQ ID NO: 102938 - DNA, 21 bp, Artificial Sequence
  primer
tgcagacacgtacatgcagag

SEQ ID NO: 102939 - DNA, 21 bp, Artificial Sequence
  primer
gcaggaaaggtttactgtgcc

SEQ ID NO: 102940 - DNA, 21 bp, Artificial Sequence
  primer
tgaaatgaattctggcctcag

SEQ ID NO: 102941 - DNA, 21 bp, Artificial Sequence
  primer
ggacttcaccaggtagatggg

SEQ ID NO: 102942 - DNA, 38 bp, Artificial Sequence
  primer
gtaaaacgacggccagtagagctgaaaccacatctccc

SEQ ID NO: 102943 - DNA, 21 bp, Artificial Sequence
  primer
gtagctccactgctcctctgg

SEQ ID NO: 102944 - DNA, 21 bp, Artificial Sequence
  primer
attgggtgcctagtaacagcc

SEQ ID NO: 102945 - DNA, 38 bp, Artificial Sequence
  primer
gtaaaacgacggccagtagtggaacagggtcacagagc

SEQ ID NO: 102946 - DNA, 20 bp, Artificial Sequence
  primer
agaccagggtttgcacacag

SEQ ID NO: 102947 - DNA, 20 bp, Artificial Sequence
  primer
cccagagcctagagtgtccc

SEQ ID NO: 102948 - DNA, 21 bp, Artificial Sequence
  primer
gctggtctgcggagcttatag

SEQ ID NO: 102949 - DNA, 20 bp, Artificial Sequence
  primer
agataagaaggctggctccg

SEQ ID NO: 102950 - DNA, 37 bp, Artificial Sequence
  primer
gtaaaacgacggccagtagagcctcaagggtggagag

SEQ ID NO: 102951 - DNA, 21 bp, Artificial Sequence
  primer
gcggttaccttctctcctttg

SEQ ID NO: 102952 - DNA, 38 bp, Artificial Sequence
  primer
gtaaaacgacggccagtacccagtgaggtacagggttg

SEQ ID NO: 102953 - DNA, 21 bp, Artificial Sequence
  primer
caaaggacctactctgggtcg

SEQ ID NO: 102954 - DNA, 20 bp, Artificial Sequence
  primer
ggtggtattggtcatggctg

SEQ ID NO: 102955 - DNA, 37 bp, Artificial Sequence
  primer
gtaaaacgacggccagtgagttccgaggacagggaag

SEQ ID NO: 102956 - DNA, 21 bp, Artificial Sequence
  primer
gaggtttgagtgacagcaccc

SEQ ID NO: 102957 - DNA, 22 bp, Artificial Sequence
  primer
tcaggtacacatctccctggtc

SEQ ID NO: 102958 - DNA, 38 bp, Artificial Sequence
  primer
gtaaaacgacggccagttcagatctccatcaggctcag

SEQ ID NO: 102959 - DNA, 38 bp, Artificial Sequence; identical to SEQ ID NO: 102958
  primer

SEQ ID NO: 102960 - DNA, 41 bp, Artificial Sequence
  primer
gtaaaacgacggccagtgcaatttcacagacggaagatatg

SEQ ID NO: 102961 - DNA, 21 bp, Artificial Sequence
  primer
atgctgatggtacagcagtcg

SEQ ID NO: 102962 - DNA, 37 bp, Artificial Sequence
  primer
gtaaaacgacggccagtatggcaaatgagtgccattg

SEQ ID NO: 102963 - DNA, 38 bp, Artificial Sequence
  primer
gtaaaacgacggccagtggaatgcttgtttcaggttgg

SEQ ID NO: 102964 - DNA, 21 bp, Artificial Sequence
  primer
tcatttctttggcctgaatcc

SEQ ID NO: 102965 - DNA, 22 bp, Artificial Sequence
  primer
tggctcatttgtcactctatgc

SEQ ID NO: 102966 - DNA, 21 bp, Artificial Sequence
  primer
ttacgggaggtccagtgtctc

SEQ ID NO: 102967 - DNA, 38 bp, Artificial Sequence
  primer
gtaaaacgacggccagtttgagccagggttacattctg

SEQ ID NO: 102968 - DNA, 20 bp, Artificial Sequence
  primer
aggcaggtttccaaaggaag

SEQ ID NO: 102969 - DNA, 39 bp, Artificial Sequence
  primer
gtaaaacgacggccagttctctgccaggctaagacaatc

SEQ ID NO: 102970 - DNA, 21 bp, Artificial Sequence
  primer
gcaggccacagtagaccttta

SEQ ID NO: 102971 - DNA, 22 bp, Artificial Sequence
  primer
tcactgaagacctccaagatcc

SEQ ID NO: 102972 - DNA, 23 bp, Artificial Sequence
  primer
aaaggttgtcctgcactaaacag

SEQ ID NO: 102973 - DNA, 24 bp, Artificial Sequence
  primer
tttgaaggttccattgtacatcac

SEQ ID NO: 102974 - DNA, 26 bp, Artificial Sequence
  primer
gcaagtatattcaggctacatttgaa

SEQ ID NO: 102975 - DNA, 22 bp, Artificial Sequence
  primer
ttcttcaacctggcttgctaac

SEQ ID NO: 102976 - DNA, 25 bp, Artificial Sequence
  primer
gtgaaagggttagaagtgttcaaag

SEQ ID NO: 102977 - DNA, 37 bp, Artificial Sequence
  primer
gtaaaacgacggccagtgaatgtgcacagtggtgtgg

SEQ ID NO: 102978 - DNA, 24 bp, Artificial Sequence
  primer
aaggttgataaccaacaatgacag

SEQ ID NO: 102979 - DNA, 22 bp, Artificial Sequence
  primer
ccttatcacctttgattccagg

SEQ ID NO: 102980 - DNA, 38 bp, Artificial Sequence
  primer
gtaaaacgacggccagtctggaaagcacaatttcatgc

SEQ ID NO: 102981 - DNA, 27 bp, Artificial Sequence
  primer
gataccacattctaacacaatacatgg

SEQ ID NO: 102982 - DNA, 39 bp, Artificial Sequence
  primer
gtaaaacgacggccagtaggagacaaatgctcagtaggc

SEQ ID NO: 102983 - DNA, 38 bp, Artificial Sequence
  primer
gtaaaacgacggccagtaggatccctgttgcatacctc

SEQ ID NO: 102984 - DNA, 25 bp, Artificial Sequence
  primer
tgcaaatattgtcacccttaatctc

SEQ ID NO: 102985 - DNA, 21 bp, Artificial Sequence
  primer
gggcaagagaccaagactctg

SEQ ID NO: 102986 - DNA, 38 bp, Artificial Sequence
  primer
gtaaaacgacggccagtttgggacttccagttattggc

SEQ ID NO: 102987 - DNA, 37 bp, Artificial Sequence
  primer
gtaaaacgacggccagtcccatgcatttcagataggg

SEQ ID NO: 102988 - DNA, 21 bp, Artificial Sequence
  primer
atttgccagcagaaacatcac

SEQ ID NO: 102989 - DNA, 44 bp, Artificial Sequence
  primer
gtaaaacgacggccagtgtcagaaatctagactgttccatcttt

SEQ ID NO: 102990 - DNA, 21 bp, Artificial Sequence
  primer
gtggtggtcaaattcctttcc

SEQ ID NO: 102991 - DNA, 21 bp, Artificial Sequence
  primer
tgggagagaagcagtctccac

SEQ ID NO: 102992 - DNA, 22 bp, Artificial Sequence
  primer
gaggctgggaataagaaacaag

SEQ ID NO: 102993 - DNA, 44 bp, Artificial Sequence
  primer
gtaaaacgacggccagtttatgcgtttcatacttagacaaagag

SEQ ID NO: 102994 - DNA, 38 bp, Artificial Sequence
  primer
gtaaaacgacggccagttccagggtttccagtcttacc

SEQ ID NO: 102995 - DNA, 23 bp, Artificial Sequence
  primer
caatgacccaatgattaaaggag

SEQ ID NO: 102996 - DNA, 41 bp, Artificial Sequence
  primer
gtaaaacgacggccagtgactatatgcaaccagaaaggcac

SEQ ID NO: 102997 - DNA, 25 bp, Artificial Sequence
  primer
aactttaaatcagtgaagggaaagc

SEQ ID NO: 102998 - DNA, 22 bp, Artificial Sequence
  primer
ttccacctgctttcaagttagc

SEQ ID NO: 102999 - DNA, 21 bp, Artificial Sequence
  primer
atagggacaaggtttgggatg

SEQ ID NO: 103000 - DNA, 38 bp, Artificial Sequence
  primer
gtaaaacgacggccagttcctggtactccctgtaatgc

SEQ ID NO: 103001 - DNA, 41 bp, Artificial Sequence
  primer
gtaaaacgacggccagtaaggaggtcagagtgtgtgtaggt

SEQ ID NO: 103002 - DNA, 22 bp, Artificial Sequence
  primer
ttggcaaacaagagaaagaagg

SEQ ID NO: 103003 - DNA, 39 bp, Artificial Sequence
  primer
gtaaaacgacggccagtcaagggatgaaactttaagggc

SEQ ID NO: 103004 - DNA, 41 bp, Artificial Sequence
  primer
gtaaaacgacggccagtttcactgtctaggaggatgagacc

SEQ ID NO: 103005 - DNA, 23 bp, Artificial Sequence
  primer
ttcagctcagtcttgaaacaacc

SEQ ID NO: 103006 - DNA, 40 bp, Artificial Sequence
  primer
gtaaaacgacggccagttgtgaccataaatatcaccctcc

SEQ ID NO: 103007 - DNA, 39 bp, Artificial Sequence
  primer
gtaaaacgacggccagtcagttagagaaggcctctcagg

SEQ ID NO: 103008 - DNA, 21 bp, Artificial Sequence
  primer
actccttgtgctcctgctttc

SEQ ID NO: 103009 - DNA, 23 bp, Artificial Sequence
  primer
gaggcccatagtgatccatattc

SEQ ID NO: 103010 - DNA, 21 bp, Artificial Sequence
  primer
tttgttccctctgtgttccag

SEQ ID NO: 103011 - DNA, 38 bp, Artificial Sequence
  primer
gtaaaacgacggccagttggcttaatctgagccaatgc

SEQ ID NO: 103012 - DNA, 22 bp, Artificial Sequence
  primer
gatctagccaatgaactcaggg

SEQ ID NO: 103013 - DNA, 21 bp, Artificial Sequence
  primer
tgaacaccatattctccctgc

SEQ ID NO: 103014 - DNA, 23 bp, Artificial Sequence
  primer
ttcataataaactgcttgggaaa

SEQ ID NO: 103015 - DNA, 38 bp, Artificial Sequence
  primer
gtaaaacgacggccagtagattgaattctgcatgtgcc

SEQ ID NO: 103016 - DNA, 43 bp, Artificial Sequence
  primer
gtaaaacgacggccagtcactgtcttcattacacatatggtcc

SEQ ID NO: 103017 - DNA, 38 bp, Artificial Sequence
  primer
gtaaaacgacggccagtagggtccttgctttcatggag

SEQ ID NO: 103018 - DNA, 21 bp, Artificial Sequence
  primer
caaacttactcttgggcctgg

SEQ ID NO: 103019 - DNA, 38 bp, Artificial Sequence
  primer
gtaaaacgacggccagtccagccctgtatcaggttagc

SEQ ID NO: 103020 - DNA, 27 bp, Artificial Sequence
  primer
aatcacttactttgttcttgagaatgg

SEQ ID NO: 103021 - DNA, 35 bp, Artificial Sequence
  primer
gtaaaacgacggccagtaaatggcttctgccaggg

SEQ ID NO: 103022 - DNA, 38 bp, Artificial Sequence
  primer
gtaaaacgacggccagtagggtaaggcaaactaagcca

SEQ ID NO: 103023 - DNA, 24 bp, Artificial Sequence
  primer
ctacccttctgtatctgcagtttg

SEQ ID NO: 103024 - DNA, 23 bp, Artificial Sequence
  primer
ggaggaagtctgttcttcctgag

SEQ ID NO: 103025 - DNA, 21 bp, Artificial Sequence
  primer
gtagcggctagtcatgcacac

SEQ ID NO: 103026 - DNA, 21 bp, Artificial Sequence
  primer
taacaggccttggtatgctgc

SEQ ID NO: 103027 - DNA, 43 bp, Artificial Sequence
  primer
gtaaaacgacggccagtcacacacatataacctccaacaagac

SEQ ID NO: 103028 - DNA, 24 bp, Artificial Sequence
  primer
tcctgggaaatatttggtctactg

SEQ ID NO: 103029 - DNA, 38 bp, Artificial Sequence
  primer
gtaaaacgacggccagtcctaggtccctgatcaccttg

SEQ ID NO: 103030 - DNA, 23 bp, Artificial Sequence
  primer
ttctggcccttactcaatatgtc

SEQ ID NO: 103031 - DNA, 38 bp, Artificial Sequence
  primer
gtaaaacgacggccagtataaatgcccacataccaccc

SEQ ID NO: 103032 - DNA, 21 bp, Artificial Sequence
  primer
tcaacccactccactcacttg

SEQ ID NO: 103033 - DNA, 44 bp, Artificial Sequence
  primer
gtaaaacgacggccagttgacagatacattcatcacacataatc

SEQ ID NO: 103034 - DNA, 38 bp, Artificial Sequence
  primer
gtaaaacgacggccagtttcattcacctctcctgcttg

SEQ ID NO: 103035 - DNA, 47 bp, Artificial Sequence
  primer
gtaaaacgacggccagtccatatctatttatgggaaggatatagttg

SEQ ID NO: 103036 - DNA, 22 bp, Artificial Sequence
  primer
tgacaacagccatattggaaac

SEQ ID NO: 103037 - DNA, 23 bp, Artificial Sequence
  primer
cacccatccattcatgcatatag

SEQ ID NO: 103038 - DNA, 21 bp, Artificial Sequence
  primer
tttgtggataggagcttgtgg

SEQ ID NO: 103039 - DNA, 39 bp, Artificial Sequence
  primer
gtaaaacgacggccagtcacatttcccacagatattccc

SEQ ID NO: 103040 - DNA, 22 bp, Artificial Sequence
  primer
tccaacccacctaatctttgtg

SEQ ID NO: 103041 - DNA, 24 bp, Artificial Sequence
  primer
ggcaaactttagaggtatctgtgc

SEQ ID NO: 103042 - DNA, 21 bp, Artificial Sequence
  primer
ggaaggaatgaaggaaggaag

SEQ ID NO: 103043 - DNA, 40 bp, Artificial Sequence
  primer
gtaaaacgacggccagtcaaactatttgtgatttgggctg

SEQ ID NO: 103044 - DNA, 22 bp, Artificial Sequence
  primer
gcagttccactgtgtgaaagag

SEQ ID NO: 103045 - DNA, 38 bp, Artificial Sequence
  primer
gtaaaacgacggccagttgtgttggaatccctacatgc

SEQ ID NO: 103046 - DNA, 20 bp, Artificial Sequence
  primer
gtgccttgagcagtggagtc

SEQ ID NO: 103047 - DNA, 39 bp, Artificial Sequence
  primer
gtaaaacgacggccagtcaaagtgattcaactggagcaa

SEQ ID NO: 103048 - DNA, 40 bp, Artificial Sequence
  primer
gtaaaacgacggccagtccttcagtccagacctcaatttc

SEQ ID NO: 103049 - DNA, 43 bp, Artificial Sequence
  primer
gtaaaacgacggccagttcaatgaagtctctagaacaaatggt

SEQ ID NO: 103050 - DNA, 21 bp, Artificial Sequence
  primer
tgccttacaatttgagttccc

SEQ ID NO: 103051 - DNA, 22 bp, Artificial Sequence
  primer
tgacaaaccaagaggtttgagg

SEQ ID NO: 103052 - DNA, 38 bp, Artificial Sequence
  primer
gtaaaacgacggccagtctggctgtttagagggatgtg

SEQ ID NO: 103053 - DNA, 22 bp, Artificial Sequence
  primer
gacagacatgcttctgtcatgc

SEQ ID NO: 103054 - DNA, 38 bp, Artificial Sequence
  primer
gtaaaacgacggccagttttattaaggcagccgtgttc

SEQ ID NO: 103055 - DNA, 40 bp, Artificial Sequence
  primer
gtaaaacgacggccagttgacctatttgtgaaggacatgg

SEQ ID NO: 103056 - DNA, 23 bp, Artificial Sequence
  primer
ttgaagtgccactatccactacc

SEQ ID NO: 103057 - DNA, 21 bp, Artificial Sequence
  primer
tctggcagtacagccttcttc

SEQ ID NO: 103058 - DNA, 22 bp, Artificial Sequence
  primer
aatggaatcacacaagctgaac

SEQ ID NO: 103059 - DNA, 21 bp, Artificial Sequence
  primer
gtgcttgctctctgactctgc

SEQ ID NO: 103060 - DNA, 21 bp, Artificial Sequence
  primer
gttccaaattgcagtgtttgc

SEQ ID NO: 103061 - DNA, 37 bp, Artificial Sequence
  primer
gtaaaacgacggccagtcaggaagaagcagccctatg

SEQ ID NO: 103062 - DNA, 21 bp, Artificial Sequence
  primer
aattacaggcacggctgtctc

SEQ ID NO: 103063 - DNA, 21 bp, Artificial Sequence
  primer
gaagaggaaggcatggttcac

SEQ ID NO: 103064 - DNA, 19 bp, Artificial Sequence
  primer
accagagtgactgtgcggc

SEQ ID NO: 103065 - DNA, 38 bp, Artificial Sequence
  primer
gtaaaacgacggccagttgtggcagtggtcaagttctc

SEQ ID NO: 103066 - DNA, 21 bp, Artificial Sequence
  primer
caggaactggacgggaagtag

SEQ ID NO: 103067 - DNA, 38 bp, Artificial Sequence
  primer
gtaaaacgacggccagtttactggcatggctggttatc

SEQ ID NO: 103068 - DNA, 35 bp, Artificial Sequence
  primer
gtaaaacgacggccagtagtgggagctgagccagg

SEQ ID NO: 103069 - DNA, 21 bp, Artificial Sequence
  primer
gccaggtggaagatcgaatag

SEQ ID NO: 103070 - DNA, 38 bp, Artificial Sequence
  primer
gtaaaacgacggccagtgtacccataaccagctccctg

SEQ ID NO: 103071 - DNA, 21 bp, Artificial Sequence
  primer
gggaagaacctgaggacacac

SEQ ID NO: 103072 - DNA, 38 bp, Artificial Sequence
  primer
gtaaaacgacggccagtcaagtctctcccagacggaag

SEQ ID NO: 103073 - DNA, 21 bp, Artificial Sequence
  primer
tgttgggaaaggctaaaggac

SEQ ID NO: 103074 - DNA, 21 bp, Artificial Sequence
  primer
acctctcacccatgtaccctg

SEQ ID NO: 103075 - DNA, 22 bp, Artificial Sequence
  primer
tcacagagcaggatctagggag

SEQ ID NO: 103076 - DNA, 38 bp, Artificial Sequence
  primer
gtaaaacgacggccagtcaaagacaggcttccttggtc

SEQ ID NO: 103077 - DNA, 38 bp, Artificial Sequence
  primer
gtaaaacgacggccagtgggccttggctctccttatag

SEQ ID NO: 103078 - DNA, 21 bp, Artificial Sequence
  primer
actcgactcaagtgcacctcc

SEQ ID NO: 103079 - DNA, 37 bp, Artificial Sequence
  primer
gtaaaacgacggccagtgagaagcagaagatgccagg

SEQ ID NO: 103080 - DNA, 38 bp, Artificial Sequence
  primer
gtaaaacgacggccagtggtctgtctgaccctaaagcg

SEQ ID NO: 103081 - DNA, 38 bp, Artificial Sequence
  primer
gtaaaacgacggccagtgggtttgatgagagaagggtc

SEQ ID NO: 103082 - DNA, 38 bp, Artificial Sequence
  primer
gtaaaacgacggccagttacagatgatgcctggctctg

SEQ ID NO: 103083 - DNA, 21 bp, Artificial Sequence
  primer
accaggaagaagctagggagc

SEQ ID NO: 103084 - DNA, 38 bp, Artificial Sequence
  primer
gtaaaacgacggccagtcttacaggtgggtccttgctc

SEQ ID NO: 103085 - DNA, 21 bp, Artificial Sequence
  primer
gctgcaggaggaaatgaagtc

SEQ ID NO: 103086 - DNA, 23 bp, Artificial Sequence
  primer
gtgacctaaagcaagtctttccc

SEQ ID NO: 103087 - DNA, 38 bp, Artificial Sequence
  primer
gtaaaacgacggccagtgtacctccatctccatcgcag

SEQ ID NO: 103088 - DNA, 21 bp, Artificial Sequence
  primer
ggatgagctggtgggtaagtc

SEQ ID NO: 103089 - DNA, 21 bp, Artificial Sequence
  primer
aagcacctggaacataggagg

SEQ ID NO: 103090 - DNA, 21 bp, Artificial Sequence
  primer
tagcccgaaacaccatctagg

SEQ ID NO: 103091 - DNA, 36 bp, Artificial Sequence
  primer
gtaaaacgacggccagtgtcaccgtccacattcgtg

SEQ ID NO: 103092 - DNA, 38 bp, Artificial Sequence
  primer
gtaaaacgacggccagtgactcagaatgccaggtcagg

SEQ ID NO: 103093 - DNA, 38 bp, Artificial Sequence
  primer
gtaaaacgacggccagtctggtcattctgaacgtctgg

SEQ ID NO: 103094 - DNA, 20 bp, Artificial Sequence
  primer
actctggcctcaagtgatcg

SEQ ID NO: 103095 - DNA, 38 bp, Artificial Sequence
  primer
gtaaaacgacggccagtcagggtgagcctagaaccttg

SEQ ID NO: 103096 - DNA, 38 bp, Artificial Sequence
  primer
gtaaaacgacggccagtttgttctgaggagctgtgagc

SEQ ID NO: 103097 - DNA, 21 bp, Artificial Sequence
  primer
tggttattatcagcaccgcac

SEQ ID NO: 103098 - DNA, 21 bp, Artificial Sequence
  primer
agagaggatgtgctggaggag

SEQ ID NO: 103099 - DNA, 38 bp, Artificial Sequence
  primer
gtaaaacgacggccagtctccttatctgaccacctggc

SEQ ID NO: 103100 - DNA, 38 bp, Artificial Sequence
  primer
gtaaaacgacggccagtggtacatgaccatctccctgg

SEQ ID NO: 103101 - DNA, 38 bp, Artificial Sequence
  primer
gtaaaacgacggccagtttatcccagccacaagaaagg

SEQ ID NO: 103102 - DNA, 21 bp, Artificial Sequence
  primer
tggcctaccaagagagactgg

SEQ ID NO: 103103 - DNA, 39 bp, Artificial Sequence
  primer
gtaaaacgacggccagtggagacttaggtcttggatggg

SEQ ID NO: 103104 - DNA, 38 bp, Artificial Sequence
  primer
gtaaaacgacggccagtagcagaagatccttcagtggc

SEQ ID NO: 103105 - DNA, 38 bp, Artificial Sequence
  primer
gtaaaacgacggccagtgcaacaggaggaaagacaagc

SEQ ID NO: 103106 - DNA, 21 bp, Artificial Sequence
  primer
taacagcacagagaagcctgg

SEQ ID NO: 103107 - DNA, 20 bp, Artificial Sequence
  primer
acctgtcccatccatgatcc

SEQ ID NO: 103108 - DNA, 21 bp, Artificial Sequence
  primer
gctgaatgtggatctgacagc

SEQ ID NO: 103109 - DNA, 38 bp, Artificial Sequence
  primer
gtaaaacgacggccagtgccctgaatgacaaagacaac

SEQ ID NO: 103110 - DNA, 21 bp, Artificial Sequence
  primer
cagaagcctgggaagttcttg

SEQ ID NO: 103111 - DNA, 40 bp, Artificial Sequence
  primer
gtaaaacgacggccagtgggcctagttctttaattcccac

SEQ ID NO: 103112 - DNA, 38 bp, Artificial Sequence
  primer
gtaaaacgacggccagttttgctgtgtgactgtgggtc

SEQ ID NO: 103113 - DNA, 21 bp, Artificial Sequence
  primer
atctgttaatgccaattcccg

SEQ ID NO: 103114 - DNA, 38 bp, Artificial Sequence
  primer
gtaaaacgacggccagtttctggatgtgttggttctgc

SEQ ID NO: 103115 - DNA, 38 bp, Artificial Sequence
  primer
gtaaaacgacggccagtgacggagaaaggtcaacaatg

SEQ ID NO: 103116 - DNA, 21 bp, Artificial Sequence
  primer
ttgtcacagagcaaggaggtg

SEQ ID NO: 103117 - DNA, 21 bp, Artificial Sequence
  primer
gagggtgttcatgcctgattc

SEQ ID NO: 103118 - DNA, 21 bp, Artificial Sequence
  primer
aggagtgaaggtgggaaccag

SEQ ID NO: 103119 - DNA, 20 bp, Artificial Sequence
  primer
cccatccacttacccagtcc

SEQ ID NO: 103120 - DNA, 38 bp, Artificial Sequence
  primer
gtaaaacgacggccagtgagagttagggaacctggctg

SEQ ID NO: 103121 - DNA, 38 bp, Artificial Sequence
  primer
gtaaaacgacggccagtcggagggagagaatgtaccac

SEQ ID NO: 103122 - DNA, 22 bp, Artificial Sequence
  primer
gagtctgtgggctacaagaacc

SEQ ID NO: 103123 - DNA, 21 bp, Artificial Sequence
  primer
cctagacccagcttagggctc

SEQ ID NO: 103124 - DNA, 37 bp, Artificial Sequence
  primer
gtaaaacgacggccagtacatggaaggcactgaccac

SEQ ID NO: 103125 - DNA, 38 bp, Artificial Sequence
  primer
gtaaaacgacggccagtggcggaaatcaaatactccac

SEQ ID NO: 103126 - DNA, 21 bp, Artificial Sequence
  primer
gacaggcacagctcagaacag

SEQ ID NO: 103127 - DNA, 38 bp, Artificial Sequence
  primer
gtaaaacgacggccagtagcttcccagagaggaaagtg

SEQ ID NO: 103128 - DNA, 21 bp, Artificial Sequence
  primer
atccattgttcccaaggacac

SEQ ID NO: 103129 - DNA, 21 bp, Artificial Sequence
  primer
caatctccgtcctgcctattt

SEQ ID NO: 103130 - DNA, 21 bp, Artificial Sequence
  primer
gtttggcttcattgactaccg

SEQ ID NO: 103131 - DNA, 41 bp, Artificial Sequence
  primer
gtaaaacgacggccagttgacccagtatctcttcttatggg

SEQ ID NO: 103132 - DNA, 41 bp, Artificial Sequence
  primer
gtaaaacgacggccagtcctggagtcacattcaatatttcc

SEQ ID NO: 103133 - DNA, 44 bp, Artificial Sequence
  primer
gtaaaacgacggccagtcaggcttatttctaaggatagaatgtg

SEQ ID NO: 103134 - DNA, 24 bp, Artificial Sequence
  primer
tttattcaatgtccctaggtttcc

SEQ ID NO: 103135 - DNA, 38 bp, Artificial Sequence
  primer
gtaaaacgacggccagtgccatcaagagcacaaggtag

SEQ ID NO: 103136 - DNA, 21 bp, Artificial Sequence
  primer
ctcaggaatgagggaatccag

SEQ ID NO: 103137 - DNA, 38 bp, Artificial Sequence
  primer
gtaaaacgacggccagtatcaccataattcagcccagg

SEQ ID NO: 103138 - DNA, 38 bp, Artificial Sequence
  primer
gtaaaacgacggccagtgatttaactggcagagggtgc

SEQ ID NO: 103139 - DNA, 21 bp, Artificial Sequence
  primer
tgcatttccaaaggtacttcc

SEQ ID NO: 103140 - DNA, 21 bp, Artificial Sequence
  primer
ttcaggaagcctccttgtgtc

SEQ ID NO: 103141 - DNA, 21 bp, Artificial Sequence
  primer
gacgtgcacttgtagtcccag

SEQ ID NO: 103142 - DNA, 44 bp, Artificial Sequence
  primer
gtaaaacgacggccagtccttcattaaatggaataaagatggtc

SEQ ID NO: 103143 - DNA, 38 bp, Artificial Sequence
  primer
gtaaaacgacggccagtgatacctgtgtggcatggttg

SEQ ID NO: 103144 - DNA, 25 bp, Artificial Sequence
  primer
tccttccctatattcacttctggac

SEQ ID NO: 103145 - DNA, 19 bp, Artificial Sequence
  primer
tcttcccttgcactggcac

SEQ ID NO: 103146 - DNA, 21 bp, Artificial Sequence
  primer
agagcagcactgtccaagagg

SEQ ID NO: 103147 - DNA, 21 bp, Artificial Sequence
  primer
aaagggacatttgggattgtg

SEQ ID NO: 103148 - DNA, 42 bp, Artificial Sequence
  primer
gtaaaacgacggccagtaagtgaatcatatacgcttgctgtc

SEQ ID NO: 103149 - DNA, 21 bp, Artificial Sequence
  primer
cttgttgggaaggaaacaagg

SEQ ID NO: 103150 - DNA, 21 bp, Artificial Sequence
  primer
tttggaagacgtaatgaaggg

SEQ ID NO: 103151 - DNA, 23 bp, Artificial Sequence
  primer
ggccatttaatgccttgtatcac

SEQ ID NO: 103152 - DNA, 21 bp, Artificial Sequence
  primer
gtctcccactccacgtaaacc

SEQ ID NO: 103153 - DNA, 39 bp, Artificial Sequence
  primer
gtaaaacgacggccagtcaaaggaatgcgagttgctatc

SEQ ID NO: 103154 - DNA, 40 bp, Artificial Sequence
  primer
gtaaaacgacggccagtaagacgtttcatcagtcaccaag

SEQ ID NO: 103155 - DNA, 21 bp, Artificial Sequence
  primer
ctgcgaggctcacaataaatc

SEQ ID NO: 103156 - DNA, 37 bp, Artificial Sequence
  primer
gtaaaacgacggccagtactcctggcctcaagcaatc

SEQ ID NO: 103157 - DNA, 38 bp, Artificial Sequence
  primer
gtaaaacgacggccagttcctttgggtccttgtaaacc

SEQ ID NO: 103158 - DNA, 21 bp, Artificial Sequence
  primer
atctaagccaacactgggctg

SEQ ID NO: 103159 - DNA, 21 bp, Artificial Sequence
  primer
catcaggattcccacagtctc

SEQ ID NO: 103160 - DNA, 21 bp, Artificial Sequence
  primer
ttggtgtcactggcattcttc

SEQ ID NO: 103161 - DNA, 38 bp, Artificial Sequence
  primer
gtaaaacgacggccagttttggtcaggacaaaccagtg

SEQ ID NO: 103162 - DNA, 40 bp, Artificial Sequence
  primer
gtaaaacgacggccagtagggcagaatgatctttgatatg

SEQ ID NO: 103163 - DNA, 38 bp, Artificial Sequence
  primer
gtaaaacgacggccagtgtaaccctgtgccttcctcac

SEQ ID NO: 103164 - DNA, 23 bp, Artificial Sequence
  primer
ttgggtgacagttgacaagttac

SEQ ID NO: 103165 - DNA, 20 bp, Artificial Sequence
  primer
atacttgcaactgcgatggg

SEQ ID NO: 103166 - DNA, 23 bp, Artificial Sequence
  primer
tgtccctgaaacatgaaacattc

SEQ ID NO: 103167 - DNA, 21 bp, Artificial Sequence
  primer
cctgcagatcagtaacttgcg

SEQ ID NO: 103168 - DNA, 38 bp, Artificial Sequence
  primer
gtaaaacgacggccagtgaggtgaccaggcccttaaac

SEQ ID NO: 103169 - DNA, 38 bp, Artificial Sequence
  primer
gtaaaacgacggccagtagcagtgtttctccaagagcc

SEQ ID NO: 103170 - DNA, 21 bp, Artificial Sequence
  primer
ggctatgtacacactgctggc

SEQ ID NO: 103171 - DNA, 22 bp, Artificial Sequence
  primer
aggttgtcagactctctggctc

SEQ ID NO: 103172 - DNA, 22 bp, Artificial Sequence
  primer
ccgtgctggtactcacagagac

SEQ ID NO: 103173 - DNA, 21 bp, Artificial Sequence
  primer
ttaggacagagtccctggtgg

SEQ ID NO: 103174 - DNA, 21 bp, Artificial Sequence
  primer
gctcctcaagatacctccacc

SEQ ID NO: 103175 - DNA, 38 bp, Artificial Sequence
  primer
gtaaaacgacggccagtaaataacaactgcccagcctc

SEQ ID NO: 103176 - DNA, 21 bp, Artificial Sequence
  primer
gcctggataaccctagggaac

SEQ ID NO: 103177 - DNA, 38 bp, Artificial Sequence
  primer
gtaaaacgacggccagttccactgagctccacagtgtc

SEQ ID NO: 103178 - DNA, 21 bp, Artificial Sequence
  primer
ccttgctccttgcagtagatg

SEQ ID NO: 103179 - DNA, 38 bp, Artificial Sequence
  primer
gtaaaacgacggccagtatcgaccctcccattcctatc

SEQ ID NO: 103180 - DNA, 37 bp, Artificial Sequence
  primer
gtaaaacgacggccagtacccaatacaccctgcagac

SEQ ID NO: 103181 - DNA, 38 bp, Artificial Sequence
  primer
gtaaaacgacggccagtgagcaatgagcaagggttacg

SEQ ID NO: 103182 - DNA, 21 bp, Artificial Sequence
  primer
cccacaactgtcagagcaaag

SEQ ID NO: 103183 - DNA, 21 bp, Artificial Sequence
  primer
actttgggctcttaccgtctg

SEQ ID NO: 103184 - DNA, 21 bp, Artificial Sequence
  primer
agccagcaataccaggttcac

SEQ ID NO: 103185 - DNA, 38 bp, Artificial Sequence
  primer
gtaaaacgacggccagttgggagctgaagctgtatctg

SEQ ID NO: 103186 - DNA, 38 bp, Artificial Sequence
  primer
gtaaaacgacggccagtgaaagaggaggatgacatgcg

SEQ ID NO: 103187 - DNA, 21 bp, Artificial Sequence
  primer
ggtacacagggagtcagtggg

SEQ ID NO: 103188 - DNA, 20 bp, Artificial Sequence
  primer
aggagagagaagagggtggg

SEQ ID NO: 103189 - DNA, 38 bp, Artificial Sequence
  primer
gtaaaacgacggccagtccctaacccaaactccatctc

SEQ ID NO: 103190 - DNA, 37 bp, Artificial Sequence
  primer
gtaaaacgacggccagtctctactcaggacccagccc

SEQ ID NO: 103191 - DNA, 37 bp, Artificial Sequence
  primer
gtaaaacgacggccagttgtgtagacacccaaagggc

SEQ ID NO: 103192 - DNA, 21 bp, Artificial Sequence
  primer
acactcctctccaccaatgtg

SEQ ID NO: 103193 - DNA, 20 bp, Artificial Sequence
  primer
gatagtgcctgctgctgtcc

SEQ ID NO: 103194 - DNA, 21 bp, Artificial Sequence
  primer
ggattgtgtcatctgtggagg

SEQ ID NO: 103195 - DNA, 38 bp, Artificial Sequence
  primer
gtaaaacgacggccagtttactttgggaccatcagtgc

SEQ ID NO: 103196 - DNA, 21 bp, Artificial Sequence
  primer
ccttcccttcctcccatgtag

SEQ ID NO: 103197 - DNA, 39 bp, Artificial Sequence
  primer
gtaaaacgacggccagtaacagaaaccttcatcaccagg

SEQ ID NO: 103198 - DNA, 21 bp, Artificial Sequence
  primer
agagctcccacttaccctctg

SEQ ID NO: 103199 - DNA, 37 bp, Artificial Sequence
  primer
gtaaaacgacggccagttcttcactcctacggccttg

SEQ ID NO: 103200 - DNA, 20 bp, Artificial Sequence
  primer
cttcccatctctcctcccac

SEQ ID NO: 103201 - DNA, 38 bp, Artificial Sequence
  primer
gtaaaacgacggccagtctggtctggacatgatggttc

SEQ ID NO: 103202 - DNA, 21 bp, Artificial Sequence
  primer
agctccttctaccaacatggg

SEQ ID NO: 103203 - DNA, 21 bp, Artificial Sequence
  primer
cacagtcagcacttcagggag

SEQ ID NO: 103204 - DNA, 38 bp, Artificial Sequence
  primer
gtaaaacgacggccagtactcagaggagtgaaggccag

SEQ ID NO: 103205 - DNA, 21 bp, Artificial Sequence
  primer
gatgagaactgacagtggccc

SEQ ID NO: 103206 - DNA, 38 bp, Artificial Sequence
  primer
gtaaaacgacggccagtaaggatgatgagtgcaagtgg

SEQ ID NO: 103207 - DNA, 21 bp, Artificial Sequence
  primer
cgacaaccttcccattgtacc

SEQ ID NO: 103208 - DNA, 21 bp, Artificial Sequence
  primer
agacttgttccaacctgccac

SEQ ID NO: 103209 - DNA, 38 bp, Artificial Sequence
  primer
gtaaaacgacggccagtcaccctgaggagagagtgagc

SEQ ID NO: 103210 - DNA, 38 bp, Artificial Sequence
  primer
gtaaaacgacggccagtacaccgattgagtcaggtcag

SEQ ID NO: 103211 - DNA, 38 bp, Artificial Sequence
  primer
gtaaaacgacggccagtttagggtgatcccaagctgtc

SEQ ID NO: 103212 - DNA, 21 bp, Artificial Sequence
  primer
cgagaggctgattcatgtttg

SEQ ID NO: 103213 - DNA, 38 bp, Artificial Sequence
  primer
gtaaaacgacggccagtgatgccatcactgttagctgc

SEQ ID NO: 103214 - DNA, 35 bp, Artificial Sequence
  primer
gtaaaacgacggccagtgcatctcctcccttgctg

SEQ ID NO: 103215 - DNA, 37 bp, Artificial Sequence
  primer
gtaaaacgacggccagtcctcctctcaagcccaacag

SEQ ID NO: 103216 - DNA, 21 bp, Artificial Sequence
  primer
tgcctctgatgatcctgtcac

SEQ ID NO: 103217 - DNA, 38 bp, Artificial Sequence
  primer
gtaaaacgacggccagttcagccattcagtgcagagtc

SEQ ID NO: 103218 - DNA, 21 bp, Artificial Sequence
  primer
ccatggtcagttcaacgtttc

SEQ ID NO: 103219 - DNA, 26 bp, Artificial Sequence
  primer
cgtaatacaaacatggctatttgatg

SEQ ID NO: 103220 - DNA, 22 bp, Artificial Sequence
  primer
ttctcagtctgttgtttggtgc

SEQ ID NO: 103221 - DNA, 47 bp, Artificial Sequence
  primer
gtaaaacgacggccagtaagaactcataatagtgagacgtaatatcg

SEQ ID NO: 103222 - DNA, 41 bp, Artificial Sequence
  primer
gtaaaacgacggccagtgaattcctagaagagcaaccattc

SEQ ID NO: 103223 - DNA, 22 bp, Artificial Sequence
  primer
tgctggaatggctgaattatag

SEQ ID NO: 103224 - DNA, 21 bp, Artificial Sequence
  primer
tttatcagctctgggaagtgg

SEQ ID NO: 103225 - DNA, 21 bp, Artificial Sequence
  primer
tcaatggatgagtcttctccg

SEQ ID NO: 103226 - DNA, 21 bp, Artificial Sequence
  primer
tcccagctggacctttgatac

SEQ ID NO: 103227 - DNA, 38 bp, Artificial Sequence
  primer
gtaaaacgacggccagttttggcacataattgtccagt

SEQ ID NO: 103228 - DNA, 25 bp, Artificial Sequence
  primer
tgaattggttaccattattcacacc

SEQ ID NO: 103229 - DNA, 38 bp, Artificial Sequence
  primer
gtaaaacgacggccagtcagctatactcactgcagccc

SEQ ID NO: 103230 - DNA, 23 bp, Artificial Sequence
  primer
ggactgaatgcagatataatggc

SEQ ID NO: 103231 - DNA, 24 bp, Artificial Sequence
  primer
tggtcaacagagatgctaatgtgt

SEQ ID NO: 103232 - DNA, 24 bp, Artificial Sequence
  primer
tcagtttcctagaaagagtctggg

SEQ ID NO: 103233 - DNA, 21 bp, Artificial Sequence
  primer
gaagcacatgctttcatggag

SEQ ID NO: 103234 - DNA, 38 bp, Artificial Sequence
  primer
gtaaaacgacggccagtgggaccctaagaacaaaccaa

SEQ ID NO: 103235 - DNA, 21 bp, Artificial Sequence
  primer
gaaacacagggaggattcgac

SEQ ID NO: 103236 - DNA, 21 bp, Artificial Sequence
  primer
aacacctggaataccagcctc

SEQ ID NO: 103237 - DNA, 38 bp, Artificial Sequence
  primer
gtaaaacgacggccagtattggctgtctcaccctgaag

SEQ ID NO: 103238 - DNA, 23 bp, Artificial Sequence
  primer
ttacaaagccaggaaagttgttg

SEQ ID NO: 103239 - DNA, 44 bp, Artificial Sequence
  primer
gtaaaacgacggccagtctaaggcaagtgttctatcttctcttc

SEQ ID NO: 103240 - DNA, 38 bp, Artificial Sequence
  primer
gtaaaacgacggccagtcacactcaaggataggccaac

SEQ ID NO: 103241 - DNA, 37 bp, Artificial Sequence
  primer
gtaaaacgacggccagttcctccatgctttgaagagg

SEQ ID NO: 103242 - DNA, 40 bp, Artificial Sequence
  primer
gtaaaacgacggccagtcagagagaagtcagaaggttgga

SEQ ID NO: 103243 - DNA, 39 bp, Artificial Sequence
  primer
gtaaaacgacggccagtgcaagtttcatcattgctttgg

SEQ ID NO: 103244 - DNA, 21 bp, Artificial Sequence
  primer
ttaatgtgctctggaacggac

SEQ ID NO: 103245 - DNA, 43 bp, Artificial Sequence
  primer
gtaaaacgacggccagtaatgttaaatctcaaatatcatggca

SEQ ID NO: 103246 - DNA, 38 bp, Artificial Sequence
  primer
gtaaaacgacggccagtccaaacatttgcaatgatgct

SEQ ID NO: 103247 - DNA, 20 bp, Artificial Sequence
  primer
cattccttgcagaccaggag

SEQ ID NO: 103248 - DNA, 23 bp, Artificial Sequence
  primer
tcgattactttccaggagtgttg

SEQ ID NO: 103249 - DNA, 38 bp, Artificial Sequence
  primer
gtaaaacgacggccagtgtcattcgggtctttaggtgg

SEQ ID NO: 103250 - DNA, 22 bp, Artificial Sequence
  primer
acacttacagggctaccacgag

SEQ ID NO: 103251 - DNA, 38 bp, Artificial Sequence
  primer
gtaaaacgacggccagtatctccaaattgaggctcagg

SEQ ID NO: 103252 - DNA, 38 bp, Artificial Sequence
  primer
gtaaaacgacggccagttttcaaagagcgacaataggg

SEQ ID NO: 103253 - DNA, 21 bp, Artificial Sequence
  primer
ttgctggtgctgagattcata

SEQ ID NO: 103254 - DNA, 24 bp, Artificial Sequence
  primer
cctgaaagtcatttatggtttgtg

SEQ ID NO: 103255 - DNA, 19 bp, Artificial Sequence
  primer
catccttgcctggagaacc

SEQ ID NO: 103256 - DNA, 37 bp, Artificial Sequence
  primer
gtaaaacgacggccagtggcctggagctccctaatac

SEQ ID NO: 103257 - DNA, 41 bp, Artificial Sequence
  primer
gtaaaacgacggccagttcctggctaatttactccagtgac

SEQ ID NO: 103258 - DNA, 39 bp, Artificial Sequence
  primer
gtaaaacgacggccagtaagctcaatttcacctttgctg

SEQ ID NO: 103259 - DNA, 39 bp, Artificial Sequence
  primer
gtaaaacgacggccagtcctctgtcaccactctttccag

SEQ ID NO: 103260 - DNA, 22 bp, Artificial Sequence
  primer
ttaacttggccttgcatttacc

SEQ ID NO: 103261 - DNA, 24 bp, Artificial Sequence
  primer
tgaactgctttccatatcattgtc

SEQ ID NO: 103262 - DNA, 38 bp, Artificial Sequence
  primer
gtaaaacgacggccagtaatcttcccattgtgtcatgc

SEQ ID NO: 103263 - DNA, 37 bp, Artificial Sequence
  primer
gtaaaacgacggccagtgggtccaacaggtccctaag

SEQ ID NO: 103264 - DNA, 22 bp, Artificial Sequence
  primer
aacataatgcgctgtgtttctg

SEQ ID NO: 103265 - DNA, 24 bp, Artificial Sequence
  primer
tttcgttcccattctaatctaagc

SEQ ID NO: 103266 - DNA, 25 bp, Artificial Sequence
  primer
tgctttgtgatgaacatataggaag

SEQ ID NO: 103267 - DNA, 38 bp, Artificial Sequence
  primer
gtaaaacgacggccagtacattccctgcaatgaatcag

SEQ ID NO: 103268 - DNA, 19 bp, Artificial Sequence
  primer
cggtcacttgcactggttg

SEQ ID NO: 103269 - DNA, 21 bp, Artificial Sequence
  primer
cataacaaaggaggctcggtc

SEQ ID NO: 103270 - DNA, 21 bp, Artificial Sequence
  primer
aggctttcacctgaattgctg

SEQ ID NO: 103271 - DNA, 38 bp, Artificial Sequence
  primer
gtaaaacgacggccagtcctggttctccagtatcaccc

SEQ ID NO: 103272 - DNA, 21 bp, Artificial Sequence
  primer
caaggactaaggagctcagcc

SEQ ID NO: 103273 - DNA, 21 bp, Artificial Sequence
  primer
ggtctcggttctggatttacc

SEQ ID NO: 103274 - DNA, 21 bp, Artificial Sequence
  primer
aagcaactttccaattgtggc

SEQ ID NO: 103275 - DNA, 21 bp, Artificial Sequence
  primer
taccttcatccctggtaagcc

SEQ ID NO: 103276 - DNA, 38 bp, Artificial Sequence
  primer
gtaaaacgacggccagtttcagaaacaatcgatcagcc

SEQ ID NO: 103277 - DNA, 38 bp, Artificial Sequence
  primer
gtaaaacgacggccagttactggtggtccggtaaatcc

SEQ ID NO: 103278 - DNA, 21 bp, Artificial Sequence
  primer
ccgccatgtccaaattaagag

SEQ ID NO: 103279 - DNA, 24 bp, Artificial Sequence
  primer
tccaaagtattgactaagggatgg

SEQ ID NO: 103280 - DNA, 39 bp, Artificial Sequence
  primer
gtaaaacgacggccagttgtcagatcacagagcacttcc

SEQ ID NO: 103281 - DNA, 38 bp, Artificial Sequence
  primer
gtaaaacgacggccagttttccagaccaggattgaatg

SEQ ID NO: 103282 - DNA, 38 bp, Artificial Sequence
  primer
gtaaaacgacggccagtgttcacctttctctccgaccc

SEQ ID NO: 103283 - DNA, 38 bp, Artificial Sequence
  primer
gtaaaacgacggccagtttgtgtttctgtgaatctgcg

SEQ ID NO: 103284 - DNA, 21 bp, Artificial Sequence
  primer
gaagcagtaaccgtcagaggc

SEQ ID NO: 103285 - DNA, 26 bp, Artificial Sequence
  primer
gctttctttacctcgtgatatctttc

SEQ ID NO: 103286 - DNA, 20 bp, Artificial Sequence
  primer
cagggtcctctccttcctcc

SEQ ID NO: 103287 - DNA, 21 bp, Artificial Sequence
  primer
ggaagaaatagaaagcgtggg

SEQ ID NO: 103288 - DNA, 21 bp, Artificial Sequence
  primer
agattgctaccgattgtgtgc

SEQ ID NO: 103289 - DNA, 22 bp, Artificial Sequence
  primer
cgcctttctattacactctggc

SEQ ID NO: 103290 - DNA, 21 bp, Artificial Sequence
  primer
gctccaaagccggtaagtatg

SEQ ID NO: 103291 - DNA, 39 bp, Artificial Sequence
  primer
gtaaaacgacggccagtgccttctatggagtgaaatccc

SEQ ID NO: 103292 - DNA, 38 bp, Artificial Sequence
  primer
gtaaaacgacggccagtaacgacacaactctgtccacg

SEQ ID NO: 103293 - DNA, 23 bp, Artificial Sequence
  primer
tcatgaaacaagttcatttgtgc

SEQ ID NO: 103294 - DNA, 38 bp, Artificial Sequence
  primer
gtaaaacgacggccagtcctggaagaatcaaagccaag

SEQ ID NO: 103295 - DNA, 38 bp, Artificial Sequence
  primer
gtaaaacgacggccagtgaaagaccaacagtcagcgtg

SEQ ID NO: 103296 - DNA, 21 bp, Artificial Sequence
  primer
gaagctcctgaaatcactggg

SEQ ID NO: 103297 - DNA, 37 bp, Artificial Sequence
  primer
gtaaaacgacggccagtacatgtcctgggacgttcac

SEQ ID NO: 103298 - DNA, 38 bp, Artificial Sequence
  primer
gtaaaacgacggccagtaggcctctaagatttgcatcg

SEQ ID NO: 103299 - DNA, 21 bp, Artificial Sequence
  primer
agtgggtgggagaagaatctg

SEQ ID NO: 103300 - DNA, 37 bp, Artificial Sequence
  primer
gtaaaacgacggccagtggccaaaggaaaggactgtg

SEQ ID NO: 103301 - DNA, 22 bp, Artificial Sequence
  primer
cattgagcaccaggaatcctac

SEQ ID NO: 103302 - DNA, 21 bp, Artificial Sequence
  primer
tttatggaggacccgataacc

SEQ ID NO: 103303 - DNA, 21 bp, Artificial Sequence
  primer
cgcacacatgctaaagaatcc

SEQ ID NO: 103304 - DNA, 21 bp, Artificial Sequence
  primer
aaatgtcatccatccctgagc

SEQ ID NO: 103305 - DNA, 38 bp, Artificial Sequence
  primer
gtaaaacgacggccagttgggactccctgtgtgttatg

SEQ ID NO: 103306 - DNA, 22 bp, Artificial Sequence
  primer
cagaacatccataagtttgggc

SEQ ID NO: 103307 - DNA, 38 bp, Artificial Sequence
  primer
gtaaaacgacggccagttctgtgatgggaactccttgg

SEQ ID NO: 103308 - DNA, 21 bp, Artificial Sequence
  primer
tagttgcagggatgtgcagtc

SEQ ID NO: 103309 - DNA, 20 bp, Artificial Sequence
  primer
catgtgtcttgcaggcattg

SEQ ID NO: 103310 - DNA, 21 bp, Artificial Sequence
  primer
gccaaacacaatttcaagctg

SEQ ID NO: 103311 - DNA, 21 bp, Artificial Sequence
  primer
tgatgccaataaagatgtggg

SEQ ID NO: 103312 - DNA, 21 bp, Artificial Sequence
  primer
gcggtgctatcagtgctaagg

SEQ ID NO: 103313 - DNA, 37 bp, Artificial Sequence
  primer
gtaaaacgacggccagtcccaattctgtgcattcctg

SEQ ID NO: 103314 - DNA, 38 bp, Artificial Sequence
  primer
gtaaaacgacggccagttgggtgaggaggaactctgac

SEQ ID NO: 103315 - DNA, 20 bp, Artificial Sequence
  primer
atgcctggttctgctccttc

SEQ ID NO: 103316 - DNA, 18 bp, Artificial Sequence
  primer
cagcagcagaggcgagtc

SEQ ID NO: 103317 - DNA, 18 bp, Artificial Sequence
  primer
actgtgcccagccaactg

SEQ ID NO: 103318 - DNA, 38 bp, Artificial Sequence
  primer
gtaaaacgacggccagtcttaagcagcgagatgcagag

SEQ ID NO: 103319 - DNA, 38 bp, Artificial Sequence
  primer
gtaaaacgacggccagttttgcattggaaggtgttacg

SEQ ID NO: 103320 - DNA, 22 bp, Artificial Sequence
  primer
aagcagggtgtgttagttacgc

SEQ ID NO: 103321 - DNA, 21 bp, Artificial Sequence
  primer
actcaaacgtcccaaccactc

SEQ ID NO: 103322 - DNA, 21 bp, Artificial Sequence
  primer
aaagcatgatgagggaagagc

SEQ ID NO: 103323 - DNA, 21 bp, Artificial Sequence
  primer
tcaagcaatgatgaaactgcc

SEQ ID NO: 103324 - DNA, 39 bp, Artificial Sequence
  primer
gtaaaacgacggccagtaagcaaatgcaattaaccaagg

SEQ ID NO: 103325 - DNA, 21 bp, Artificial Sequence
  primer
cgtctcaattctgaagccaag

SEQ ID NO: 103326 - DNA, 38 bp, Artificial Sequence
  primer
gtaaaacgacggccagtcagttatgcttccgttctggc

SEQ ID NO: 103327 - DNA, 38 bp, Artificial Sequence
  primer
gtaaaacgacggccagtagattatgccgccattctagg

SEQ ID NO: 103328 - DNA, 21 bp, Artificial Sequence
  primer
cattgaagaagtggcatctgg

SEQ ID NO: 103329 - DNA, 38 bp, Artificial Sequence
  primer
gtaaaacgacggccagtaaagtgtgcaaggaatggtcc

SEQ ID NO: 103330 - DNA, 22 bp, Artificial Sequence
  primer
tgcaaacaacaaatcattccac

SEQ ID NO: 103331 - DNA, 38 bp, Artificial Sequence
  primer
gtaaaacgacggccagttccctatgcaaatggtctgtc

SEQ ID NO: 103332 - DNA, 18 bp, Artificial Sequence
  primer
tgggaggacccggttatg

SEQ ID NO: 103333 - DNA, 21 bp, Artificial Sequence
  primer
gccagtgtttatgatgccaag

SEQ ID NO: 103334 - DNA, 21 bp, Artificial Sequence
  primer
agtgctagatgttcgtgctgg

SEQ ID NO: 103335 - DNA, 21 bp, Artificial Sequence
  primer
tgacccggttcaagtattgtg

SEQ ID NO: 103336 - DNA, 20 bp, Artificial Sequence
  primer
acacgtggctcgtaggtcac

SEQ ID NO: 103337 - DNA, 21 bp, Artificial Sequence
  primer
cacaggcaacatgaaggtctc

SEQ ID NO: 103338 - DNA, 21 bp, Artificial Sequence
  primer
caacgaagtctcccttgtgtg

SEQ ID NO: 103339 - DNA, 21 bp, Artificial Sequence
  primer
actggattcgttcccagagtc

SEQ ID NO: 103340 - DNA, 20 bp, Artificial Sequence
  primer
ccttgggtccatgagtgttg

SEQ ID NO: 103341 - DNA, 38 bp, Artificial Sequence
  primer
gtaaaacgacggccagtagggatttgcatgtgaagctg

SEQ ID NO: 103342 - DNA, 21 bp, Artificial Sequence
  primer
gcacaggttggtttagtgctc

SEQ ID NO: 103343 - DNA, 38 bp, Artificial Sequence
  primer
gtaaaacgacggccagtttgtacgtgcgagaacagatg

SEQ ID NO: 103344 - DNA, 37 bp, Artificial Sequence
  primer
gtaaaacgacggccagtaccaggccactatgttgtgc

SEQ ID NO: 103345 - DNA, 20 bp, Artificial Sequence
  primer
tgtgctgagatgctggacac

SEQ ID NO: 103346 - DNA, 19 bp, Artificial Sequence
  primer
agccattccgaaacacctg

SEQ ID NO: 103347 - DNA, 21 bp, Artificial Sequence
  primer
accgctgcttcctaccaaatc

SEQ ID NO: 103348 - DNA, 21 bp, Artificial Sequence
  primer
tctcaggctgtttgtgtctcc

SEQ ID NO: 103349 - DNA, 36 bp, Artificial Sequence
  primer
gtaaaacgacggccagtcccagcagagctgtctcag

SEQ ID NO: 103350 - DNA, 21 bp, Artificial Sequence
  primer
acatggtcagtgtgttgaggc

SEQ ID NO: 103351 - DNA, 21 bp, Artificial Sequence
  primer
aaccgaggttactcaggcatc

SEQ ID NO: 103352 - DNA, 39 bp, Artificial Sequence
  primer
gtaaaacgacggccagtaaattccagaccaaagcatgtc

SEQ ID NO: 103353 - DNA, 38 bp, Artificial Sequence
  primer
gtaaaacgacggccagtctgaaattggctcacatgctc

SEQ ID NO: 103354 - DNA, 38 bp, Artificial Sequence
  primer
gtaaaacgacggccagttttgatctgtttggcaagtcg

SEQ ID NO: 103355 - DNA, 21 bp, Artificial Sequence
  primer
gggtgtgattggaggaaattg

SEQ ID NO: 103356 - DNA, 21 bp, Artificial Sequence
  primer
tcgtatgggccttagaagtcg

SEQ ID NO: 103357 - DNA, 21 bp, Artificial Sequence
  primer
atagcacttcaggaagcccac

SEQ ID NO: 103358 - DNA, 21 bp, Artificial Sequence
  primer
agctctttcctgcacttctgc

SEQ ID NO: 103359 - DNA, 20 bp, Artificial Sequence
  primer
acagcgtggaaatgaacgtc

SEQ ID NO: 103360 - DNA, 22 bp, Artificial Sequence
  primer
caaacaagacgttagggacacg

SEQ ID NO: 103361 - DNA, 21 bp, Artificial Sequence
  primer
ttacaacatgtgacccatgcc

SEQ ID NO: 103362 - DNA, 38 bp, Artificial Sequence
  primer
gtaaaacgacggccagtcgttatggctggaaactgacc

SEQ ID NO: 103363 - DNA, 37 bp, Artificial Sequence
  primer
gtaaaacgacggccagtccttcctgcagaccacagtc

SEQ ID NO: 103364 - DNA, 38 bp, Artificial Sequence
  primer
gtaaaacgacggccagtgtagatggacccttccgtcag

SEQ ID NO: 103365 - DNA, 20 bp, Artificial Sequence
  primer
aaaggcagctgttcttgctg

SEQ ID NO: 103366 - DNA, 22 bp, Artificial Sequence
  primer
tggatgcaaattcctttggtag

SEQ ID NO: 103367 - DNA, 38 bp, Artificial Sequence
  primer
gtaaaacgacggccagtctcgttgacccaagaacacag

SEQ ID NO: 103368 - DNA, 40 bp, Artificial Sequence
  primer
gtaaaacgacggccagtcatcatggagcaatattgtttgg

SEQ ID NO: 103369 - DNA, 38 bp, Artificial Sequence
  primer
gtaaaacgacggccagtgtcatgtgctgcctttcattc

SEQ ID NO: 103370 - DNA, 18 bp, Artificial Sequence
  primer
tgcacacacggacagcag

SEQ ID NO: 103371 - DNA, 39 bp, Artificial Sequence
  primer
gtaaaacgacggccagtcccagatcacagaactgacttg

SEQ ID NO: 103372 - DNA, 35 bp, Artificial Sequence
  primer
gtaaaacgacggccagtctcagcctcgccactagc

SEQ ID NO: 103373 - DNA, 22 bp, Artificial Sequence
  primer
ggaaatggaacaacatactgcg

SEQ ID NO: 103374 - DNA, 38 bp, Artificial Sequence
  primer
gtaaaacgacggccagtaattctctccaggtttgcagc

SEQ ID NO: 103375 - DNA, 37 bp, Artificial Sequence
  primer
gtaaaacgacggccagttcatggcctttcttggtcag

SEQ ID NO: 103376 - DNA, 39 bp, Artificial Sequence
  primer
gtaaaacgacggccagtcctgtcctgcttgtatttcagg

SEQ ID NO: 103377 - DNA, 21 bp, Artificial Sequence
  primer
aagcctgtctgcctttcattg

SEQ ID NO: 103378 - DNA, 21 bp, Artificial Sequence
  primer
tgcatgtattcatccattccc

SEQ ID NO: 103379 - DNA, 38 bp, Artificial Sequence
  primer
gtaaaacgacggccagtgacaatccctgccctagaatg

SEQ ID NO: 103380 - DNA, 22 bp, Artificial Sequence
  primer
gagacgaagtaaagagaggcga

SEQ ID NO: 103381 - DNA, 38 bp, Artificial Sequence
  primer
gtaaaacgacggccagtatcacagcaggaaatgcatcc

SEQ ID NO: 103382 - DNA, 21 bp, Artificial Sequence
  primer
agggatccttgtgagttccag

SEQ ID NO: 103383 - DNA, 21 bp, Artificial Sequence
  primer
cagcttggcccgtaagtaaac

SEQ ID NO: 103384 - DNA, 20 bp, Artificial Sequence
  primer
ctgggctgagctggacttag

SEQ ID NO: 103385 - DNA, 20 bp, Artificial Sequence
  primer
agcaatagctgctctgcctg

SEQ ID NO: 103386 - DNA, 37 bp, Artificial Sequence
  primer
gtaaaacgacggccagttgagttgggcatcttgttcc

SEQ ID NO: 103387 - DNA, 21 bp, Artificial Sequence
  primer
acaggagccaacttcttctgg

SEQ ID NO: 103388 - DNA, 23 bp, Artificial Sequence
  primer
tcactggtcctaagtcagacagc

SEQ ID NO: 103389 - DNA, 21 bp, Artificial Sequence
  primer
catcactagtgccttccaggg

SEQ ID NO: 103390 - DNA, 20 bp, Artificial Sequence
  primer
tctgttccctttcctcaccc

SEQ ID NO: 103391 - DNA, 37 bp, Artificial Sequence
  primer
gtaaaacgacggccagtattgaacccagcctggaaac

SEQ ID NO: 103392 - DNA, 37 bp, Artificial Sequence
  primer
gtaaaacgacggccagtgctgtgaggagggtttgttg

SEQ ID NO: 103393 - DNA, 39 bp, Artificial Sequence
  primer
gtaaaacgacggccagttgggatcattgttatctcaggg

SEQ ID NO: 103394 - DNA, 21 bp, Artificial Sequence
  primer
gtgacatccaccaatccaatg

SEQ ID NO: 103395 - DNA, 20 bp, Artificial Sequence
  primer
gtgcctactgtttgcaaggc

SEQ ID NO: 103396 - DNA, 38 bp, Artificial Sequence
  primer
gtaaaacgacggccagtagtgatgaactgtgctgagcg

SEQ ID NO: 103397 - DNA, 22 bp, Artificial Sequence
  primer
gtcttggagaagcttcgttagc

SEQ ID NO: 103398 - DNA, 21 bp, Artificial Sequence
  primer
aggtaagacactgccctgtgc

SEQ ID NO: 103399 - DNA, 35 bp, Artificial Sequence
  primer
gtaaaacgacggccagtcattagccactgcgcctg

SEQ ID NO: 103400 - DNA, 41 bp, Artificial Sequence
  primer
gtaaaacgacggccagtccagataagtgcatacaaactggc

SEQ ID NO: 103401 - DNA, 38 bp, Artificial Sequence
  primer
gtaaaacgacggccagtgatgggagaattcttcatgcc

SEQ ID NO: 103402 - DNA, 38 bp, Artificial Sequence
  primer
gtaaaacgacggccagtccatgttaagcagcaaagcac

SEQ ID NO: 103403 - DNA, 37 bp, Artificial Sequence
  primer
gtaaaacgacggccagtgtaattgttcatcctgccgc

SEQ ID NO: 103404 - DNA, 21 bp, Artificial Sequence
  primer
gcagcctcataagggtagtgg

SEQ ID NO: 103405 - DNA, 37 bp, Artificial Sequence
  primer
gtaaaacgacggccagttgtcaaccaaacggatttgc

SEQ ID NO: 103406 - DNA, 24 bp, Artificial Sequence
  primer
gcaaatttctgctggaacactatc

SEQ ID NO: 103407 - DNA, 19 bp, Artificial Sequence
  primer
gtgatctgcttgcctcagc

SEQ ID NO: 103408 - DNA, 21 bp, Artificial Sequence
  primer
cacaccgaatctgggtacttg

SEQ ID NO: 103409 - DNA, 21 bp, Artificial Sequence
  primer
accacaatgatttcaggaggg

SEQ ID NO: 103410 - DNA, 27 bp, Artificial Sequence
  primer
aactgtagctatgtgaagctatgttcc

SEQ ID NO: 103411 - DNA, 41 bp, Artificial Sequence
  primer
gtaaaacgacggccagtttagagcagcaaaggattacactg

SEQ ID NO: 103412 - DNA, 26 bp, Artificial Sequence
  primer
tcacagtttctaattcattccatttg

SEQ ID NO: 103413 - DNA, 39 bp, Artificial Sequence
  primer
gtaaaacgacggccagtgcaacaaggtaacatgaggagg

SEQ ID NO: 103414 - DNA, 21 bp, Artificial Sequence
  primer
agtgtgaagaggtgccttctg

SEQ ID NO: 103415 - DNA, 21 bp, Artificial Sequence
  primer
ggagccttcctacttcactcg

SEQ ID NO: 103416 - DNA, 21 bp, Artificial Sequence
  primer
cttaagtgtgccagggtctcc

SEQ ID NO: 103417 - DNA, 23 bp, Artificial Sequence
  primer
catgctgccctaaagtgtatttg

SEQ ID NO: 103418 - DNA, 21 bp, Artificial Sequence
  primer
acatttgatccttggcctttg

SEQ ID NO: 103419 - DNA, 42 bp, Artificial Sequence
  primer
gtaaaacgacggccagttttacacttaacttcagagggaagc

SEQ ID NO: 103420 - DNA, 23 bp, Artificial Sequence
  primer
catcatggagcaatattgtttgg

SEQ ID NO: 103421 - DNA, 37 bp, Artificial Sequence
  primer
gtaaaacgacggccagtctgcagcaacactcagcctc

SEQ ID NO: 103422 - DNA, 38 bp, Artificial Sequence
  primer
gtaaaacgacggccagtcacggatgtatcctgaacacg

SEQ ID NO: 103423 - DNA, 27 bp, Artificial Sequence
  primer
tgttcaatgtttcagtaactaatgtca

SEQ ID NO: 103424 - DNA, 40 bp, Artificial Sequence
  primer
gtaaaacgacggccagttcccatattcacaaatcatttca

SEQ ID NO: 103425 - DNA, 21 bp, Artificial Sequence
  primer
aaggtcttcaatggcatctgg

SEQ ID NO: 103426 - DNA, 21 bp, Artificial Sequence
  primer
tcacttggattccaccagttc

SEQ ID NO: 103427 - DNA, 23 bp, Artificial Sequence
  primer
tcaacccaagattcttccctaag

SEQ ID NO: 103428 - DNA, 25 bp, Artificial Sequence
  primer
gcctaaactttgtaggcaataagaa

SEQ ID NO: 103429 - DNA, 46 bp, Artificial Sequence
  primer
gtaaaacgacggccagtgcttctaggttattaagttcacaatgttc

SEQ ID NO: 103430 - DNA, 36 bp, Artificial Sequence
  primer
gtaaaacgacggccagttgggtgtggtggtacatgc

SEQ ID NO: 103431 - DNA, 38 bp, Artificial Sequence
  primer
gtaaaacgacggccagtcacatgcaaacctgacagagg

SEQ ID NO: 103432 - DNA, 23 bp, Artificial Sequence
  primer
tttagtaaaggcaaagccagaaa

SEQ ID NO: 103433 - DNA, 27 bp, Artificial Sequence
  primer
tttgtaaactatgtaggagatgcagaa

SEQ ID NO: 103434 - DNA, 21 bp, Artificial Sequence
  primer
gtgcacaaagggaactaaccg

SEQ ID NO: 103435 - DNA, 23 bp, Artificial Sequence
  primer
ctgttcctagcagtcaatccaac

SEQ ID NO: 103436 - DNA, 39 bp, Artificial Sequence
  primer
gtaaaacgacggccagtaaggcatttgtccaaattgttg

SEQ ID NO: 103437 - DNA, 37 bp, Artificial Sequence
  primer
gtaaaacgacggccagtggaaacagagcaagaccctg

SEQ ID NO: 103438 - DNA, 39 bp, Artificial Sequence
  primer
gtaaaacgacggccagtaaatggcagacatacccttagc

SEQ ID NO: 103439 - DNA, 21 bp, Artificial Sequence
  primer
tcccagagggtgatttctttg

SEQ ID NO: 103440 - DNA, 20 bp, Artificial Sequence
  primer
aaacaatgggtgaatcgcag

SEQ ID NO: 103441 - DNA, 20 bp, Artificial Sequence
  primer
tcccaccactgcattctagc

SEQ ID NO: 103442 - DNA, 28 bp, Artificial Sequence
  primer
tttgcaccaacctaatgtattctatatc

SEQ ID NO: 103443 - DNA, 39 bp, Artificial Sequence
  primer
gtaaaacgacggccagtaatacatcaagcctgttccacc

SEQ ID NO: 103444 - DNA, 21 bp, Artificial Sequence
  primer
tgagtatttcctgcatgggct

SEQ ID NO: 103445 - DNA, 38 bp, Artificial Sequence
  primer
gtaaaacgacggccagtttatgtagctggctttgctgg

SEQ ID NO: 103446 - DNA, 20 bp, Artificial Sequence
  primer
taatctctcaaacggcccac

SEQ ID NO: 103447 - DNA, 39 bp, Artificial Sequence
  primer
gtaaaacgacggccagtgcagttcatggaatactttggg

SEQ ID NO: 103448 - DNA, 21 bp, Artificial Sequence
  primer
taatcagaacagcctccaccc

SEQ ID NO: 103449 - DNA, 38 bp, Artificial Sequence
  primer
gtaaaacgacggccagtcagcagctgggtaaacttgag

SEQ ID NO: 103450 - DNA, 22 bp, Artificial Sequence
  primer
agggaaagcaatatttcagcaa

SEQ ID NO: 103451 - DNA, 21 bp, Artificial Sequence
  primer
acaagagatggcacaatcctg

SEQ ID NO: 103452 - DNA, 20 bp, Artificial Sequence
  primer
ttgcacccacagctaaatcc

SEQ ID NO: 103453 - DNA, 40 bp, Artificial Sequence
  primer
gtaaaacgacggccagttcttgaatgattcctggcaatac

SEQ ID NO: 103454 - DNA, 21 bp, Artificial Sequence
  primer
tggaaatactgggccagactc

SEQ ID NO: 103455 - DNA, 22 bp, Artificial Sequence
  primer
ttgaaagctactggtgctgatg

SEQ ID NO: 103456 - DNA, 43 bp, Artificial Sequence
  primer
gtaaaacgacggccagtaagacaaccaacttagctcatgaaac

SEQ ID NO: 103457 - DNA, 40 bp, Artificial Sequence
  primer
gtaaaacgacggccagttgaaatgccacattacacatctc

SEQ ID NO: 103458 - DNA, 38 bp, Artificial Sequence
  primer
gtaaaacgacggccagtccacccatacagaactgcgag

SEQ ID NO: 103459 - DNA, 39 bp, Artificial Sequence
  primer
gtaaaacgacggccagtgggaaattactgcaagaggagg

SEQ ID NO: 103460 - DNA, 38 bp, Artificial Sequence
  primer
gtaaaacgacggccagtgcttggcaaatagagaaaggg

SEQ ID NO: 103461 - DNA, 18 bp, Artificial Sequence
  primer
ggaggagggaggaaaggg

SEQ ID NO: 103462 - DNA, 24 bp, Artificial Sequence
  primer
actcttggtttatctgtctggctg

SEQ ID NO: 103463 - DNA, 22 bp, Artificial Sequence
  primer
cctcaatgaaattatccatcgg

SEQ ID NO: 103464 - DNA, 46 bp, Artificial Sequence
  primer
gtaaaacgacggccagtaaactgtttatattctacatgcctaaagc

SEQ ID NO: 103465 - DNA, 39 bp, Artificial Sequence
  primer
gtaaaacgacggccagtgactcaggactcttgcttctgg

SEQ ID NO: 103466 - DNA, 38 bp, Artificial Sequence
  primer
gtaaaacgacggccagtttaagggaaggacaaagccag

SEQ ID NO: 103467 - DNA, 38 bp, Artificial Sequence
  primer
gtaaaacgacggccagtgaggaggaatccaagcttcag

SEQ ID NO: 103468 - DNA, 18 bp, Artificial Sequence
  primer
ggcatgcgcctgtaattc

SEQ ID NO: 103469 - DNA, 19 bp, Artificial Sequence
  primer
agccagtgaaagggcaatg

SEQ ID NO: 103470 - DNA, 21 bp, Artificial Sequence
  primer
ttgggtgttgcagtttctttg

SEQ ID NO: 103471 - DNA, 20 bp, Artificial Sequence
  primer
gccaggcaagaaatgctatg

SEQ ID NO: 103472 - DNA, 21 bp, Artificial Sequence
  primer
agtcacaggtctgggaaatgg

SEQ ID NO: 103473 - DNA, 38 bp, Artificial Sequence
  primer
gtaaaacgacggccagtcaagagcagggtcactcactg

SEQ ID NO: 103474 - DNA, 21 bp, Artificial Sequence
  primer
tgaagtgcagaaataccaggg

SEQ ID NO: 103475 - DNA, 21 bp, Artificial Sequence
  primer
tgccatcctttgtcatgattc

SEQ ID NO: 103476 - DNA, 21 bp, Artificial Sequence
  primer
ctctctggtcccacattcctc

SEQ ID NO: 103477 - DNA, 21 bp, Artificial Sequence
  primer
gaaatagaaatggcggcacag

SEQ ID NO: 103478 - DNA, 38 bp, Artificial Sequence
  primer
gtaaaacgacggccagttgcggcctgaaagaaatatac

SEQ ID NO: 103479 - DNA, 38 bp, Artificial Sequence
  primer
gtaaaacgacggccagtggctgaccgaatgagtgaatg

SEQ ID NO: 103480 - DNA, 20 bp, Artificial Sequence
  primer
ttgcaaagggaaagacatgc

SEQ ID NO: 103481 - DNA, 21 bp, Artificial Sequence
  primer
cagtttggaaagccacttgag

SEQ ID NO: 103482 - DNA, 41 bp, Artificial Sequence
  primer
gtaaaacgacggccagtgctgagaatgaccatgctagtgtt

SEQ ID NO: 103483 - DNA, 21 bp, Artificial Sequence
  primer
tccaatccagagagaaatggc

SEQ ID NO: 103484 - DNA, 39 bp, Artificial Sequence
  primer
gtaaaacgacggccagtggactctgggaataaccacgac

SEQ ID NO: 103485 - DNA, 21 bp, Artificial Sequence
  primer
aggcttgagttaccggtgttg

SEQ ID NO: 103486 - DNA, 22 bp, Artificial Sequence
  primer
gtgacagaaactgatgtgtccc

SEQ ID NO: 103487 - DNA, 38 bp, Artificial Sequence
  primer
gtaaaacgacggccagtccgtcattccattgtttcatt

SEQ ID NO: 103488 - DNA, 26 bp, Artificial Sequence
  primer
tttaggactttcataattctcaacca

SEQ ID NO: 103489 - DNA, 21 bp, Artificial Sequence
  primer
aatggatggatctcaccttgg

SEQ ID NO: 103490 - DNA, 22 bp, Artificial Sequence
  primer
ttaacccaatgcaatatcccag

SEQ ID NO: 103491 - DNA, 37 bp, Artificial Sequence
  primer
gtaaaacgacggccagtcacatgaatgcattgggctc

SEQ ID NO: 103492 - DNA, 38 bp, Artificial Sequence
  primer
gtaaaacgacggccagtttaaagccatgggaacacagg

SEQ ID NO: 103493 - DNA, 26 bp, Artificial Sequence
  primer
gagtactaaaggttgagggattgttg

SEQ ID NO: 103494 - DNA, 42 bp, Artificial Sequence
  primer
gtaaaacgacggccagtttcaccatatcattgtaaagtcacc

SEQ ID NO: 103495 - DNA, 21 bp, Artificial Sequence
  primer
tgggtccctggaaatttaagc

SEQ ID NO: 103496 - DNA, 38 bp, Artificial Sequence
  primer
gtaaaacgacggccagtagaccttgctcaccctgtttg

SEQ ID NO: 103497 - DNA, 23 bp, Artificial Sequence
  primer
gatgtgattaccaccatcaaact

SEQ ID NO: 103498 - DNA, 20 bp, Artificial Sequence
  primer
gctctccttgctcacccttc

SEQ ID NO: 103499 - DNA, 21 bp, Artificial Sequence
  primer
caagctttattcctggcttgg

SEQ ID NO: 103500 - DNA, 43 bp, Artificial Sequence
  primer
gtaaaacgacggccagttgcttctctgccaccttatgttatac

SEQ ID NO: 103501 - DNA, 22 bp, Artificial Sequence
  primer
tggactgtgatttatggcaatg

SEQ ID NO: 103502 - DNA, 21 bp, Artificial Sequence
  primer
ctgctggttgcttgagaaatg

SEQ ID NO: 103503 - DNA, 39 bp, Artificial Sequence
  primer
gtaaaacgacggccagttgctgaccatggaactaatgtg

SEQ ID NO: 103504 - DNA, 38 bp, Artificial Sequence
  primer
gtaaaacgacggccagtcaaatgaggccaacctttagc

SEQ ID NO: 103505 - DNA, 38 bp, Artificial Sequence
  primer
gtaaaacgacggccagtggtgtgatggaggatacaggg

SEQ ID NO: 103506 - DNA, 23 bp, Artificial Sequence
  primer
tgataacaaatggaggcatttca

SEQ ID NO: 103507 - DNA, 38 bp, Artificial Sequence
  primer
gtaaaacgacggccagtaaagggctgaatcaagtgagg

SEQ ID NO: 103508 - DNA, 37 bp, Artificial Sequence
  primer
gtaaaacgacggccagtagcatcagtcccatcctttg

SEQ ID NO: 103509 - DNA, 38 bp, Artificial Sequence
  primer
gtaaaacgacggccagtgggaaaggaagccatgagtag

SEQ ID NO: 103510 - DNA, 18 bp, Artificial Sequence
  primer
agcaagccaacatcacgc

SEQ ID NO: 103511 - DNA, 22 bp, Artificial Sequence
  primer
ggaactgttctaaaccctgaaa

SEQ ID NO: 103512 - DNA, 21 bp, Artificial Sequence
  primer
gggcttgggatgatatctgag

SEQ ID NO: 103513 - DNA, 22 bp, Artificial Sequence
  primer
cacccataaactttcccaaagg

SEQ ID NO: 103514 - DNA, 23 bp, Artificial Sequence
  primer
aactcagaagggaaatatcaggg

SEQ ID NO: 103515 - DNA, 44 bp, Artificial Sequence
  primer
gtaaaacgacggccagtaagtgtaacatgggaattatctaccag

SEQ ID NO: 103516 - DNA, 26 bp, Artificial Sequence
  primer
catagaaacacaagtaaccattgctc

SEQ ID NO: 103517 - DNA, 38 bp, Artificial Sequence
  primer
gtaaaacgacggccagttgcctttgttggtgaattctg

SEQ ID NO: 103518 - DNA, 26 bp, Artificial Sequence
  primer
gaaagtgagctccatatttcagtagc

SEQ ID NO: 103519 - DNA, 39 bp, Artificial Sequence
  primer
gtaaaacgacggccagttgattctatcaacaccagcctc

SEQ ID NO: 103520 - DNA, 36 bp, Artificial Sequence
  primer
gtaaaacgacggccagttttggactggccacaaacc

SEQ ID NO: 103521 - DNA, 21 bp, Artificial Sequence
  primer
gccaaataagaagctgctctg

SEQ ID NO: 103522 - DNA, 23 bp, Artificial Sequence
  primer
ttcacagctgaacatgatttgac

SEQ ID NO: 103523 - DNA, 21 bp, Artificial Sequence
  primer
tcaggatgaagaggaagacgg

SEQ ID NO: 103524 - DNA, 23 bp, Artificial Sequence
  primer
gccttctttcttatttcctcagc

SEQ ID NO: 103525 - DNA, 22 bp, Artificial Sequence
  primer
aaagactgaataacctgccagc

SEQ ID NO: 103526 - DNA, 39 bp, Artificial Sequence
  primer
gtaaaacgacggccagtccagtgagccacacatagaacc

SEQ ID NO: 103527 - DNA, 38 bp, Artificial Sequence
  primer
gtaaaacgacggccagtatccaggtactccactgggtc

SEQ ID NO: 103528 - DNA, 21 bp, Artificial Sequence
  primer
gacttagcctccgatggtctg

SEQ ID NO: 103529 - DNA, 35 bp, Artificial Sequence
  primer
gtaaaacgacggccagtacaccagggcctgtcaag

SEQ ID NO: 103530 - DNA, 20 bp, Artificial Sequence
  primer
agtggaggccctatgtccag

SEQ ID NO: 103531 - DNA, 21 bp, Artificial Sequence
  primer
ggccaaggctactctagaacc

SEQ ID NO: 103532 - DNA, 42 bp, Artificial Sequence
  primer
gtaaaacgacggccagttcatcagattgttagctttggactc

SEQ ID NO: 103533 - DNA, 39 bp, Artificial Sequence
  primer
gtaaaacgacggccagttgacagggattcctcatattgg

SEQ ID NO: 103534 - DNA, 24 bp, Artificial Sequence
  primer
tccataaattgtctctttcttccc

SEQ ID NO: 103535 - DNA, 21 bp, Artificial Sequence
  primer
ggacaatgagacactgcatcc

SEQ ID NO: 103536 - DNA, 21 bp, Artificial Sequence
  primer
tccctgccctaaatctttctg

SEQ ID NO: 103537 - DNA, 38 bp, Artificial Sequence
  primer
gtaaaacgacggccagtcgtggtgaaactctctgcaac

SEQ ID NO: 103538 - DNA, 38 bp, Artificial Sequence
  primer
gtaaaacgacggccagtctttgcttgttccatgaggtc

SEQ ID NO: 103539 - DNA, 21 bp, Artificial Sequence
  primer
aaatgagcagaactgggatgg

SEQ ID NO: 103540 - DNA, 38 bp, Artificial Sequence
  primer
gtaaaacgacggccagtatgcttgcatgagacaggatg

SEQ ID NO: 103541 - DNA, 21 bp, Artificial Sequence
  primer
ttggacaagggtgtgtagtgg

SEQ ID NO: 103542 - DNA, 37 bp, Artificial Sequence
  primer
gtaaaacgacggccagtttgaatccagcttggtctgc

SEQ ID NO: 103543 - DNA, 21 bp, Artificial Sequence
  primer
tgtcatgcaacttgacagtgg

SEQ ID NO: 103544 - DNA, 38 bp, Artificial Sequence
  primer
gtaaaacgacggccagtagaggcacagattggatggtc

SEQ ID NO: 103545 - DNA, 21 bp, Artificial Sequence
  primer
tttcttgcagcatatggaagg

SEQ ID NO: 103546 - DNA, 21 bp, Artificial Sequence
  primer
agaggatctatgtgggttggg

SEQ ID NO: 103547 - DNA, 22 bp, Artificial Sequence
  primer
aaatccattacccagaaccctc

SEQ ID NO: 103548 - DNA, 21 bp, Artificial Sequence
  primer
ccatgggaagaggtctttctg

SEQ ID NO: 103549 - DNA, 38 bp, Artificial Sequence
  primer
gtaaaacgacggccagtcgagaagcttaggtggcaatc

SEQ ID NO: 103550 - DNA, 20 bp, Artificial Sequence
  primer
aggcacggaatttgacactg

SEQ ID NO: 103551 - DNA, 22 bp, Artificial Sequence
  primer
tgctcattagcagctttgtgtg

SEQ ID NO: 103552 - DNA, 21 bp, Artificial Sequence
  primer
tccctgaccaagagattggag

SEQ ID NO: 103553 - DNA, 21 bp, Artificial Sequence
  primer
cgacccagaggtatagaaggg

SEQ ID NO: 103554 - DNA, 38 bp, Artificial Sequence
  primer
gtaaaacgacggccagttcctggcttagctgtttcacc

SEQ ID NO: 103555 - DNA, 38 bp, Artificial Sequence
  primer
gtaaaacgacggccagtccaaacaagatccacagttgc

SEQ ID NO: 103556 - DNA, 21 bp, Artificial Sequence
  primer
tgtggaaggaagaaattgtgg

SEQ ID NO: 103557 - DNA, 38 bp, Artificial Sequence
  primer
gtaaaacgacggccagtttcttccctgtttcatggtcc

SEQ ID NO: 103558 - DNA, 22 bp, Artificial Sequence
  primer
catgcacctgagtcataaccac

SEQ ID NO: 103559 - DNA, 38 bp, Artificial Sequence
  primer
gtaaaacgacggccagtaaggaaagtcggtgtgctagg

SEQ ID NO: 103560 - DNA, 21 bp, Artificial Sequence
  primer
ttggcagaggactaccacaac

SEQ ID NO: 103561 - DNA, 39 bp, Artificial Sequence
  primer
gtaaaacgacggccagtcccagattcatgcaagtattca

SEQ ID NO: 103562 - DNA, 21 bp, Artificial Sequence
  primer
gtcccactactgctattgccc

SEQ ID NO: 103563 - DNA, 38 bp, Artificial Sequence
  primer
gtaaaacgacggccagtcagagaggaaggagcaagctg

SEQ ID NO: 103564 - DNA, 23 bp, Artificial Sequence
  primer
tggtacaaaccacaggaataacc

SEQ ID NO: 103565 - DNA, 20 bp, Artificial Sequence
  primer
gagggcctttgctcaagaag

SEQ ID NO: 103566 - DNA, 20 bp, Artificial Sequence
  primer
gatcagagaggtgggcagtg

SEQ ID NO: 103567 - DNA, 20 bp, Artificial Sequence
  primer
aaagagagagacccttgggc

SEQ ID NO: 103568 - DNA, 38 bp, Artificial Sequence
  primer
gtaaaacgacggccagtgagtaggctgatttgcttggg

SEQ ID NO: 103569 - DNA, 21 bp, Artificial Sequence
  primer
gaaaccaaggcagaggttcag

SEQ ID NO: 103570 - DNA, 21 bp, Artificial Sequence
  primer
ttcctcatgtccaatgactcc

SEQ ID NO: 103571 - DNA, 21 bp, Artificial Sequence
  primer
actgacagacaccagaggcag

SEQ ID NO: 103572 - DNA, 21 bp, Artificial Sequence
  primer
attcccactgggttgtgagac

SEQ ID NO: 103573 - DNA, 38 bp, Artificial Sequence
  primer
gtaaaacgacggccagtcacatatgtccagcaacaggg

SEQ ID NO: 103574 - DNA, 21 bp, Artificial Sequence
  primer
tagggaagaacatcagccacc

SEQ ID NO: 103575 - DNA, 38 bp, Artificial Sequence
  primer
gtaaaacgacggccagttgcctgaaggaaccttaccac

SEQ ID NO: 103576 - DNA, 21 bp, Artificial Sequence
  primer
gggagctttgtgaaggaagag

SEQ ID NO: 103577 - DNA, 38 bp, Artificial Sequence
  primer
gtaaaacgacggccagtcgtagggtatcccttcacagg

SEQ ID NO: 103578 - DNA, 37 bp, Artificial Sequence
  primer
gtaaaacgacggccagtgtggacctagaaagggctgg

SEQ ID NO: 103579 - DNA, 20 bp, Artificial Sequence
  primer
aagcccagtccaagcatttc

SEQ ID NO: 103580 - DNA, 21 bp, Artificial Sequence
  primer
tcaggccttccttcttcagac

SEQ ID NO: 103581 - DNA, 21 bp, Artificial Sequence
  primer
taatgggctctctaggcttcg

SEQ ID NO: 103582 - DNA, 21 bp, Artificial Sequence
  primer
gtgtctgcgtgtcgtcatctc

SEQ ID NO: 103583 - DNA, 21 bp, Artificial Sequence
  primer
cactacagtgaaacgaagccg

SEQ ID NO: 103584 - DNA, 21 bp, Artificial Sequence
  primer
tgctgcacgtcctctactgtg

SEQ ID NO: 103585 - DNA, 21 bp, Artificial Sequence
  primer
ctcctccaacagcagtcacag

SEQ ID NO: 103586 - DNA, 21 bp, Artificial Sequence
  primer
accctatcattctgggcagtg

SEQ ID NO: 103587 - DNA, 20 bp, Artificial Sequence
  primer
acacaacctctcctggcctc

SEQ ID NO: 103588 - DNA, 21 bp, Artificial Sequence
  primer
taagaagggagctcagcattg

SEQ ID NO: 103589 - DNA, 21 bp, Artificial Sequence
  primer
ggtgtaacacttgagctgccc

SEQ ID NO: 103590 - DNA, 38 bp, Artificial Sequence
  primer
gtaaaacgacggccagtacggacctgttcacaccctac

SEQ ID NO: 103591 - DNA, 38 bp, Artificial Sequence
  primer
gtaaaacgacggccagttccatccaggagacataaggg

SEQ ID NO: 103592 - DNA, 38 bp, Artificial Sequence
  primer
gtaaaacgacggccagtggtcacagtgtggagaggagg

SEQ ID NO: 103593 - DNA, 38 bp, Artificial Sequence
  primer
gtaaaacgacggccagtcaagaccacagactgagacgg

SEQ ID NO: 103594 - DNA, 21 bp, Artificial Sequence
  primer
tgagcctgactcactcactcc

SEQ ID NO: 103595 - DNA, 19 bp, Artificial Sequence
  primer
aacaggcactggaccaagg

SEQ ID NO: 103596 - DNA, 38 bp, Artificial Sequence
  primer
gtaaaacgacggccagtcgtaaagcaaggacaattccc

SEQ ID NO: 103597 - DNA, 20 bp, Artificial Sequence
  primer
gacgcacccatcacaagaag

SEQ ID NO: 103598 - DNA, 21 bp, Artificial Sequence
  primer
tcacccaccaaccctatcttc

SEQ ID NO: 103599 - DNA, 21 bp, Artificial Sequence
  primer
atactgactgttggaatggcg

SEQ ID NO: 103600 - DNA, 21 bp, Artificial Sequence
  primer
cagtcagggtctctccaatgc

SEQ ID NO: 103601 - DNA, 20 bp, Artificial Sequence
  primer
ccgtctgttctcaggtcgag

SEQ ID NO: 103602 - DNA, 37 bp, Artificial Sequence
  primer
gtaaaacgacggccagtaacatcagtgtcccgctcac

SEQ ID NO: 103603 - DNA, 38 bp, Artificial Sequence
  primer
gtaaaacgacggccagtatgctaaagtctccaggtgcc

SEQ ID NO: 103604 - DNA, 21 bp, Artificial Sequence
  primer
gaaagagccagaaagggaagg

SEQ ID NO: 103605 - DNA, 21 bp, Artificial Sequence
  primer
ttcttggcactctgagctttg

SEQ ID NO: 103606 - DNA, 21 bp, Artificial Sequence
  primer
gagaccaaacgggtcttcatc

SEQ ID NO: 103607 - DNA, 21 bp, Artificial Sequence
  primer
ttcctttccaagctggatgtc

SEQ ID NO: 103608 - DNA, 21 bp, Artificial Sequence
  primer
cacacaagtgactgggaggac

SEQ ID NO: 103609 - DNA, 21 bp, Artificial Sequence
  primer
cactttccacagagtggcatc

SEQ ID NO: 103610 - DNA, 37 bp, Artificial Sequence
  primer
gtaaaacgacggccagtttctgagaagctgccctgtg

SEQ ID NO: 103611 - DNA, 37 bp, Artificial Sequence
  primer
gtaaaacgacggccagtagaacccagggtggagacag

SEQ ID NO: 103612 - DNA, 21 bp, Artificial Sequence
  primer
catagctggatgcaaggtgag

SEQ ID NO: 103613 - DNA, 21 bp, Artificial Sequence
  primer
gttcaagagcttaaggccagc

SEQ ID NO: 103614 - DNA, 21 bp, Artificial Sequence
  primer
gtagccttgcaacttgggttc

SEQ ID NO: 103615 - DNA, 38 bp, Artificial Sequence
  primer
gtaaaacgacggccagtagacgctccacgtctctgtag

SEQ ID NO: 103616 - DNA, 38 bp, Artificial Sequence
  primer
gtaaaacgacggccagtgacccacccttgggatcttag

SEQ ID NO: 103617 - DNA, 21 bp, Artificial Sequence
  primer
gaccagccagaatttcacctc

SEQ ID NO: 103618 - DNA, 20 bp, Artificial Sequence
  primer
ctgcccacagatgccataag

SEQ ID NO: 103619 - DNA, 36 bp, Artificial Sequence
  primer
gtaaaacgacggccagtggaatcgtggagggaacag

SEQ ID NO: 103620 - DNA, 21 bp, Artificial Sequence
  primer
atgagaagcgtctgtttgacg

SEQ ID NO: 103621 - DNA, 38 bp, Artificial Sequence
  primer
gtaaaacgacggccagtattgcctttcagtccaagagc

SEQ ID NO: 103622 - DNA, 20 bp, Artificial Sequence
  primer
caacacagagtggctcctcc

SEQ ID NO: 103623 - DNA, 36 bp, Artificial Sequence
  primer
gtaaaacgacggccagtacaaggccagacacggaac

SEQ ID NO: 103624 - DNA, 38 bp, Artificial Sequence
  primer
gtaaaacgacggccagttaccatttaccagtgggctgc

SEQ ID NO: 103625 - DNA, 21 bp, Artificial Sequence
  primer
acacacacacgttgtgggaac

SEQ ID NO: 103626 - DNA, 21 bp, Artificial Sequence
  primer
ggaccttcatcacctttctgc

SEQ ID NO: 103627 - DNA, 38 bp, Artificial Sequence
  primer
gtaaaacgacggccagtcttccagttggaatgaggagg

SEQ ID NO: 103628 - DNA, 21 bp, Artificial Sequence
  primer
ctgcaccagggtttcctattc

SEQ ID NO: 103629 - DNA, 21 bp, Artificial Sequence
  primer
ttcccagttccatttcacaag

SEQ ID NO: 103630 - DNA, 21 bp, Artificial Sequence
  primer
atgctgactcccacatcacac

SEQ ID NO: 103631 - DNA, 21 bp, Artificial Sequence
  primer
catggaatggtcttgaagctg

SEQ ID NO: 103632 - DNA, 39 bp, Artificial Sequence
  primer
gtaaaacgacggccagtccagtgggagttcatcacaaag

SEQ ID NO: 103633 - DNA, 21 bp, Artificial Sequence
  primer
agtcaagcaagctgcaaggtc

SEQ ID NO: 103634 - DNA, 21 bp, Artificial Sequence
  primer
acctggcaagcctgtgattag

SEQ ID NO: 103635 - DNA, 37 bp, Artificial Sequence
  primer
gtaaaacgacggccagtatggacatctctgcccacac

SEQ ID NO: 103636 - DNA, 21 bp, Artificial Sequence
  primer
tctccctgaaacacagagacg

SEQ ID NO: 103637 - DNA, 21 bp, Artificial Sequence
  primer
cacctttgggaccagaatctc

SEQ ID NO: 103638 - DNA, 21 bp, Artificial Sequence
  primer
gaaggttctccgtcaataccg

SEQ ID NO: 103639 - DNA, 20 bp, Artificial Sequence
  primer
gactcaaccgacgtgtggac

SEQ ID NO: 103640 - DNA, 21 bp, Artificial Sequence
  primer
cccaatgttgagttaatgggc

SEQ ID NO: 103641 - DNA, 38 bp, Artificial Sequence
  primer
gtaaaacgacggccagtgaaagatgggaggatcgtgag

SEQ ID NO: 103642 - DNA, 21 bp, Artificial Sequence
  primer
gggtcacacacacacagttgc

SEQ ID NO: 103643 - DNA, 20 bp, Artificial Sequence
  primer
ctgaactgtccttgccacac

SEQ ID NO: 103644 - DNA, 21 bp, Artificial Sequence
  primer
tgaaacggattcatttctggc

SEQ ID NO: 103645 - DNA, 38 bp, Artificial Sequence
  primer
gtaaaacgacggccagtctataccaggtggaaggctgc

SEQ ID NO: 103646 - DNA, 38 bp, Artificial Sequence
  primer
gtaaaacgacggccagtggtaaacccgtgctgagtgag

SEQ ID NO: 103647 - DNA, 38 bp, Artificial Sequence
  primer
gtaaaacgacggccagtagggagaagccttcactgtcc

SEQ ID NO: 103648 - DNA, 21 bp, Artificial Sequence
  primer
tcccaattgtctttcaagtcg

SEQ ID NO: 103649 - DNA, 22 bp, Artificial Sequence
  primer
tctcttgagttgctgaatgctg

SEQ ID NO: 103650 - DNA, 23 bp, Artificial Sequence
  primer
gaatggttaagaggcatctgtcc

SEQ ID NO: 103651 - DNA, 43 bp, Artificial Sequence
  primer
gtaaaacgacggccagttgttctggtttgcttgtgttatacta

SEQ ID NO: 103652 - DNA, 40 bp, Artificial Sequence
  primer
gtaaaacgacggccagtccttatctaccattcattgctgc

SEQ ID NO: 103653 - DNA, 21 bp, Artificial Sequence
  primer
agcttcttgctgcattcagag

SEQ ID NO: 103654 - DNA, 22 bp, Artificial Sequence
  primer
actgtccatagcagtgttgacc

SEQ ID NO: 103655 - DNA, 25 bp, Artificial Sequence
  primer
tgtacgactgtgtttaagaagatgc

SEQ ID NO: 103656 - DNA, 23 bp, Artificial Sequence
  primer
aaagcagtcatgtcacagagacc

SEQ ID NO: 103657 - DNA, 38 bp, Artificial Sequence
  primer
gtaaaacgacggccagtctacattagggaggacctggg

SEQ ID NO: 103658 - DNA, 40 bp, Artificial Sequence
  primer
gtaaaacgacggccagtccattctgagtgctcctgtttac

SEQ ID NO: 103659 - DNA, 38 bp, Artificial Sequence
  primer
gtaaaacgacggccagtatgcaaagcagacaactggag

SEQ ID NO: 103660 - DNA, 43 bp, Artificial Sequence
  primer
gtaaaacgacggccagtcagatgaatactgcaaccatagacag

SEQ ID NO: 103661 - DNA, 21 bp, Artificial Sequence
  primer
atggtaaagccattgccactc

SEQ ID NO: 103662 - DNA, 38 bp, Artificial Sequence
  primer
gtaaaacgacggccagtgaagggctcaactctcctgtg

SEQ ID NO: 103663 - DNA, 42 bp, Artificial Sequence
  primer
gtaaaacgacggccagtaaaggcaagttcagtaaaccaaatc

SEQ ID NO: 103664 - DNA, 36 bp, Artificial Sequence
  primer
gtaaaacgacggccagttctggcatgtggtgagtgc

SEQ ID NO: 103665 - DNA, 41 bp, Artificial Sequence
  primer
gtaaaacgacggccagtttaaatgtcattcttcactttggg

SEQ ID NO: 103666 - DNA, 26 bp, Artificial Sequence
  primer
catagaagtgatatatgctcaatggg

SEQ ID NO: 103667 - DNA, 38 bp, Artificial Sequence
  primer
gtaaaacgacggccagtgaccagtgctaccctgaggtc

SEQ ID NO: 103668 - DNA, 21 bp, Artificial Sequence
  primer
cccacatttggataagtcacg

SEQ ID NO: 103669 - DNA, 41 bp, Artificial Sequence
  primer
gtaaaacgacggccagtttggaagcctaatttaacgaagtc

SEQ ID NO: 103670 - DNA, 21 bp, Artificial Sequence
  primer
aattccaagcacagatggctc

SEQ ID NO: 103671 - DNA, 23 bp, Artificial Sequence
  primer
gggttaggcctggtatttgtatc

SEQ ID NO: 103672 - DNA, 26 bp, Artificial Sequence
  primer
tttgagagagactagaagttaccgtg

SEQ ID NO: 103673 - DNA, 38 bp, Artificial Sequence
  primer
gtaaaacgacggccagtatgtcaatatgaccagcatcc

SEQ ID NO: 103674 - DNA, 21 bp, Artificial Sequence
  primer
aactccagcatttcctgcttc

SEQ ID NO: 103675 - DNA, 23 bp, Artificial Sequence
  primer
ttccaggagctccctagtatcac

SEQ ID NO: 103676 - DNA, 23 bp, Artificial Sequence
  primer
ttcactttccctgaaacttaccc

SEQ ID NO: 103677 - DNA, 24 bp, Artificial Sequence
  primer
ttagaagcccattcctttactttg

SEQ ID NO: 103678 - DNA, 40 bp, Artificial Sequence
  primer
gtaaaacgacggccagtcctagtacatagggctgctttga

SEQ ID NO: 103679 - DNA, 38 bp, Artificial Sequence
  primer
gtaaaacgacggccagttgagaaatggcttctactgcg

SEQ ID NO: 103680 - DNA, 24 bp, Artificial Sequence
  primer
ttagctgacactttagttgcaagg

SEQ ID NO: 103681 - DNA, 26 bp, Artificial Sequence
  primer
gaatgactagtgactcaggatggtag

SEQ ID NO: 103682 - DNA, 39 bp, Artificial Sequence
  primer
gtaaaacgacggccagttcacatgccattattctccaac

SEQ ID NO: 103683 - DNA, 40 bp, Artificial Sequence
  primer
gtaaaacgacggccagtcattggtcactgtgtaggaggag

SEQ ID NO: 103684 - DNA, 27 bp, Artificial Sequence
  primer
aaggagcctccaaattagttagtaaac

SEQ ID NO: 103685 - DNA, 24 bp, Artificial Sequence
  primer
agaagctcaactagcacaaacaag

SEQ ID NO: 103686 - DNA, 37 bp, Artificial Sequence
  primer
gtaaaacgacggccagtggaacaccattaggaccctg

SEQ ID NO: 103687 - DNA, 22 bp, Artificial Sequence
  primer
gcacctgggtctccaagattac

SEQ ID NO: 103688 - DNA, 22 bp, Artificial Sequence
  primer
ttaaggatgatttgctttgctg

SEQ ID NO: 103689 - DNA, 23 bp, Artificial Sequence
  primer
tttgtgacactgatcattatggg

SEQ ID NO: 103690 - DNA, 26 bp, Artificial Sequence
  primer
tctttgaagaaggatttaaaggtcac

SEQ ID NO: 103691 - DNA, 20 bp, Artificial Sequence
  primer
aggtcagtgcaaagacaccg

SEQ ID NO: 103692 - DNA, 44 bp, Artificial Sequence
  primer
gtaaaacgacggccagtaatcagaagtgtattggaactatcagg

SEQ ID NO: 103693 - DNA, 39 bp, Artificial Sequence
  primer
gtaaaacgacggccagttgtgtgtgcctatatgcagctt

SEQ ID NO: 103694 - DNA, 26 bp, Artificial Sequence
  primer
agaatagctcagagagaaatgcacta

SEQ ID NO: 103695 - DNA, 42 bp, Artificial Sequence
  primer
gtaaaacgacggccagtcagacagataaatgttcgtgtcaag

SEQ ID NO: 103696 - DNA, 38 bp, Artificial Sequence
  primer
gtaaaacgacggccagtgccaactccagcttcaatacc

SEQ ID NO: 103697 - DNA, 21 bp, Artificial Sequence
  primer
cacagacatttcttggacgga

SEQ ID NO: 103698 - DNA, 30 bp, Artificial Sequence
  primer
ccattaaattataagctccatgatatgttt

SEQ ID NO: 103699 - DNA, 27 bp, Artificial Sequence
  primer
aaatagcaaagtcctaaataaatcaaa

SEQ ID NO: 103700 - DNA, 22 bp, Artificial Sequence
  primer
ttcatgtgctaacacacacaca

SEQ ID NO: 103701 - DNA, 38 bp, Artificial Sequence
  primer
gtaaaacgacggccagttgatgcaggatcagccattac

SEQ ID NO: 103702 - DNA, 21 bp, Artificial Sequence
  primer
gagtcagatactcatgcgccc

SEQ ID NO: 103703 - DNA, 38 bp, Artificial Sequence
  primer
gtaaaacgacggccagttctcaggaaagtggccttctg

SEQ ID NO: 103704 - DNA, 20 bp, Artificial Sequence
  primer
atctatgctgacggccacac

SEQ ID NO: 103705 - DNA, 21 bp, Artificial Sequence
  primer
gcatgaactcgcttcccttag

SEQ ID NO: 103706 - DNA, 39 bp, Artificial Sequence
  primer
gtaaaacgacggccagtggtggctcaggaatatgacttg

SEQ ID NO: 103707 - DNA, 23 bp, Artificial Sequence
  primer
caccaagaccagaagtcagacag

SEQ ID NO: 103708 - DNA, 20 bp, Artificial Sequence
  primer
cactgtcagggtccaagctc

SEQ ID NO: 103709 - DNA, 18 bp, Artificial Sequence
  primer
tgttcggattacaggcgg

SEQ ID NO: 103710 - DNA, 38 bp, Artificial Sequence
  primer
gtaaaacgacggccagtagggagaagtgagtgtcggtg

SEQ ID NO: 103711 - DNA, 21 bp, Artificial Sequence
  primer
ccctttaagcctcaaatgtcc

SEQ ID NO: 103712 - DNA, 38 bp, Artificial Sequence
  primer
gtaaaacgacggccagtgcaacacaaggtgaaccagag

SEQ ID NO: 103713 - DNA, 38 bp, Artificial Sequence
  primer
gtaaaacgacggccagtatttagtggtgagggaagccc

SEQ ID NO: 103714 - DNA, 21 bp, Artificial Sequence
  primer
acagaggagtcagagcttggg

SEQ ID NO: 103715 - DNA, 38 bp, Artificial Sequence
  primer
gtaaaacgacggccagtgctattcccatcctatcctgc

SEQ ID NO: 103716 - DNA, 38 bp, Artificial Sequence
  primer
gtaaaacgacggccagtcccatccagcactgtatcttg

SEQ ID NO: 103717 - DNA, 38 bp, Artificial Sequence
  primer
gtaaaacgacggccagtcactaacgacaccagcagacc

SEQ ID NO: 103718 - DNA, 21 bp, Artificial Sequence
  primer
gcttgaatattgggaggaggg

SEQ ID NO: 103719 - DNA, 22 bp, Artificial Sequence
  primer
tgatactgagggagaagttggg

SEQ ID NO: 103720 - DNA, 21 bp, Artificial Sequence
  primer
acctgcaagtctcacctcctc

SEQ ID NO: 103721 - DNA, 21 bp, Artificial Sequence
  primer
caggcgaattatttccacatc

SEQ ID NO: 103722 - DNA, 20 bp, Artificial Sequence
  primer
gtgggtccctgtagtcccag

SEQ ID NO: 103723 - DNA, 21 bp, Artificial Sequence
  primer
agacagttcaaacctgggacc

SEQ ID NO: 103724 - DNA, 38 bp, Artificial Sequence
  primer
gtaaaacgacggccagtaggcataagaaagaagcggtg

SEQ ID NO: 103725 - DNA, 38 bp, Artificial Sequence
  primer
gtaaaacgacggccagtgggtttctgtttcttgcaacc

SEQ ID NO: 103726 - DNA, 21 bp, Artificial Sequence
  primer
agcctaacctcctggtcactc

SEQ ID NO: 103727 - DNA, 21 bp, Artificial Sequence
  primer
cccttccacattctaagagcc

SEQ ID NO: 103728 - DNA, 21 bp, Artificial Sequence
  primer
actgtaaggctgtccttggct

SEQ ID NO: 103729 - DNA, 38 bp, Artificial Sequence
  primer
gtaaaacgacggccagttacctgatcacctttgagccc

SEQ ID NO: 103730 - DNA, 21 bp, Artificial Sequence
  primer
ggctagagggtggagagtcat

SEQ ID NO: 103731 - DNA, 21 bp, Artificial Sequence
  primer
aaatgcctattgcatgtggtg

SEQ ID NO: 103732 - DNA, 21 bp, Artificial Sequence
  primer
atagccaagagccactatgcc

SEQ ID NO: 103733 - DNA, 21 bp, Artificial Sequence
  primer
ggcatagacacaaacacccag

SEQ ID NO: 103734 - DNA, 38 bp, Artificial Sequence
  primer
gtaaaacgacggccagtcctgggagatgagaccaagtc

SEQ ID NO: 103735 - DNA, 38 bp, Artificial Sequence
  primer
gtaaaacgacggccagtcccagaacaaactcaactggg

SEQ ID NO: 103736 - DNA, 38 bp, Artificial Sequence
  primer
gtaaaacgacggccagtgctgtgctcttaccactgcat

SEQ ID NO: 103737 - DNA, 38 bp, Artificial Sequence
  primer
gtaaaacgacggccagtcacagatacagggcttcctcc

SEQ ID NO: 103738 - DNA, 18 bp, Artificial Sequence
  primer
cgcctgtagtgccactcg

SEQ ID NO: 103739 - DNA, 38 bp, Artificial Sequence
  primer
gtaaaacgacggccagtcctttcacctagaggtcccac

SEQ ID NO: 103740 - DNA, 21 bp, Artificial Sequence
  primer
aaaggagggaagtcaagctcc

SEQ ID NO: 103741 - DNA, 20 bp, Artificial Sequence
  primer
tttgctttcatcatttcccg

SEQ ID NO: 103742 - DNA, 21 bp, Artificial Sequence
  primer
agcaacagaactgaccttggc

SEQ ID NO: 103743 - DNA, 19 bp, Artificial Sequence
  primer
acgttctccctgttgtggg

SEQ ID NO: 103744 - DNA, 21 bp, Artificial Sequence
  primer
actcaccgcgtctcctttatc

SEQ ID NO: 103745 - DNA, 21 bp, Artificial Sequence
  primer
atcctgtctgcagttgggttc

SEQ ID NO: 103746 - DNA, 38 bp, Artificial Sequence
  primer
gtaaaacgacggccagtgtgtgcttccactgtcgtttg

SEQ ID NO: 103747 - DNA, 21 bp, Artificial Sequence
  primer
ccttcctctgggagtgcatac

SEQ ID NO: 103748 - DNA, 38 bp, Artificial Sequence
  primer
gtaaaacgacggccagtaccactgtcaatgctggtgac

SEQ ID NO: 103749 - DNA, 20 bp, Artificial Sequence
  primer
gccttccctcactcaccttc

SEQ ID NO: 103750 - DNA, 38 bp, Artificial Sequence
  primer
gtaaaacgacggccagtgtggatgatcttgcactgtcc

SEQ ID NO: 103751 - DNA, 38 bp, Artificial Sequence
  primer
gtaaaacgacggccagttcctcaaggtaatcagggacg

SEQ ID NO: 103752 - DNA, 20 bp, Artificial Sequence
  primer
agtcctggctacttgggagg

SEQ ID NO: 103753 - DNA, 21 bp, Artificial Sequence
  primer
tgagggtacgtgagaatttgg

SEQ ID NO: 103754 - DNA, 21 bp, Artificial Sequence
  primer
ctcaagctgctcacattcctg

SEQ ID NO: 103755 - DNA, 19 bp, Artificial Sequence
  primer
gtgagttgagggctgtggg

SEQ ID NO: 103756 - DNA, 38 bp, Artificial Sequence
  primer
gtaaaacgacggccagtggagggagtaggtgcacagag

SEQ ID NO: 103757 - DNA, 21 bp, Artificial Sequence
  primer
gtcagaacacagtgtggaccc

SEQ ID NO: 103758 - DNA, 38 bp, Artificial Sequence
  primer
gtaaaacgacggccagtgtagaccatcagggtggaagg

SEQ ID NO: 103759 - DNA, 21 bp, Artificial Sequence
  primer
gccttagggtgatgagtttgg

SEQ ID NO: 103760 - DNA, 21 bp, Artificial Sequence
  primer
ttaatccagacccacgtttcc

SEQ ID NO: 103761 - DNA, 38 bp, Artificial Sequence
  primer
gtaaaacgacggccagtgagggttctggtgcagtgaag

SEQ ID NO: 103762 - DNA, 38 bp, Artificial Sequence
  primer
gtaaaacgacggccagttatttgtcgaacgcacgattg

SEQ ID NO: 103763 - DNA, 38 bp, Artificial Sequence
  primer
gtaaaacgacggccagtcagggaactaccctcttcacc

SEQ ID NO: 103764 - DNA, 22 bp, Artificial Sequence
  primer
gatagaggcaggtctctcctcc

SEQ ID NO: 103765 - DNA, 38 bp, Artificial Sequence
  primer
gtaaaacgacggccagtatcctctgctgtagtcccagc

SEQ ID NO: 103766 - DNA, 21 bp, Artificial Sequence
  primer
tatcctggcaccatcattctg

SEQ ID NO: 103767 - DNA, 21 bp, Artificial Sequence
  primer
gggtcttcgtctgtcctttcc

SEQ ID NO: 103768 - DNA, 38 bp, Artificial Sequence
  primer
gtaaaacgacggccagtcattggctccatagtcacagg

SEQ ID NO: 103769 - DNA, 37 bp, Artificial Sequence
  primer
gtaaaacgacggccagtagaatgctgaatgctgagcc

SEQ ID NO: 103770 - DNA, 38 bp, Artificial Sequence
  primer
gtaaaacgacggccagtccaaccttaggaggttgaggc

SEQ ID NO: 103771 - DNA, 38 bp, Artificial Sequence
  primer
gtaaaacgacggccagtagcctccaagagaacagggag

SEQ ID NO: 103772 - DNA, 19 bp, Artificial Sequence
  primer
ctggagaacccacaccctc

SEQ ID NO: 103773 - DNA, 21 bp, Artificial Sequence
  primer
ggctcttaccacttgctccac

SEQ ID NO: 103774 - DNA, 20 bp, Artificial Sequence
  primer
cagacacacaggtggacacg

SEQ ID NO: 103775 - DNA, 38 bp, Artificial Sequence
  primer
gtaaaacgacggccagtgtcaccactcacctcaaagcc

SEQ ID NO: 103776 - DNA, 37 bp, Artificial Sequence
  primer
gtaaaacgacggccagttctggatcctcatggtggac

SEQ ID NO: 103777 - DNA, 38 bp, Artificial Sequence
  primer
gtaaaacgacggccagtacaaggaacaggcagtgtgac

SEQ ID NO: 103778 - DNA, 22 bp, Artificial Sequence
  primer
agaagaggaagaggaaggcttg

SEQ ID NO: 103779 - DNA, 38 bp, Artificial Sequence
  primer
gtaaaacgacggccagtctgtccttgtccttccagatg

SEQ ID NO: 103780 - DNA, 21 bp, Artificial Sequence
  primer
aacgaaggcaggagtcagatg

SEQ ID NO: 103781 - DNA, 37 bp, Artificial Sequence
  primer
gtaaaacgacggccagtgtcaccttcacaccgtccac

SEQ ID NO: 103782 - DNA, 21 bp, Artificial Sequence
  primer
tccaggagaggtttccaattc

SEQ ID NO: 103783 - DNA, 21 bp, Artificial Sequence
  primer
tccaggagaggtttccaattc

SEQ ID NO: 103784 - DNA, 21 bp, Artificial Sequence
  primer
ccgagcaaagaggatcagaag

SEQ ID NO: 103785 - DNA, 38 bp, Artificial Sequence
  primer
gtaaaacgacggccagtggtctcagggacgtggagtag

SEQ ID NO: 103786 - DNA, 37 bp, Artificial Sequence
  primer
gtaaaacgacggccagtcgctctgagactgtgggaag

SEQ ID NO: 103787 - DNA, 38 bp, Artificial Sequence
  primer
gtaaaacgacggccagtatgatgtgtcctgtggctctg

SEQ ID NO: 103788 - DNA, 21 bp, Artificial Sequence
  primer
gaaacacagaggccctcaaac

SEQ ID NO: 103789 - DNA, 37 bp, Artificial Sequence
  primer
gtaaaacgacggccagtacacccagggccatagagtc

SEQ ID NO: 103790 - DNA, 18 bp, Artificial Sequence
  primer
aggagccagtgatgctgc

SEQ ID NO: 103791 - DNA, 21 bp, Artificial Sequence
  primer
tgataccgggttctgatttga

SEQ ID NO: 103792 - DNA, 20 bp, Artificial Sequence
  primer
cctgtgtgcacatgtgtgtt

SEQ ID NO: 103793 - DNA, 38 bp, Artificial Sequence
  primer
gtaaaacgacggccagtggaacagcgttgtgtcaacag

SEQ ID NO: 103794 - DNA, 35 bp, Artificial Sequence
  primer
gtaaaacgacggccagtcctcccagatgacgtgct

SEQ ID NO: 103795 - DNA, 21 bp, Artificial Sequence
  primer
agctctttgtccacaacccac

SEQ ID NO: 103796 - DNA, 38 bp, Artificial Sequence
  primer
gtaaaacgacggccagtccttctaggagtggaacaggc

SEQ ID NO: 103797 - DNA, 37 bp, Artificial Sequence
  primer
gtaaaacgacggccagttgtcctgtgacatgtgtggg

SEQ ID NO: 103798 - DNA, 39 bp, Artificial Sequence
  primer
gtaaaacgacggccagtgagtagggaagtcacagggatg

SEQ ID NO: 103799 - DNA, 36 bp, Artificial Sequence
  primer
gtaaaacgacggccagtcaggctcttgatggctctg

SEQ ID NO: 103800 - DNA, 21 bp, Artificial Sequence
  primer
ggacagacagtatcggtgtgg

SEQ ID NO: 103801 - DNA, 21 bp, Artificial Sequence
  primer
cacctacgcagatctgggact

SEQ ID NO: 103802 - DNA, 20 bp, Artificial Sequence
  primer
gagccatgcacctactctcg

SEQ ID NO: 103803 - DNA, 21 bp, Artificial Sequence
  primer
aagagcagcagcctcttcttg

SEQ ID NO: 103804 - DNA, 21 bp, Artificial Sequence
  primer
accttcctggagactgtctgg

SEQ ID NO: 103805 - DNA, 37 bp, Artificial Sequence
  primer
gtaaaacgacggccagtctagcgaatcaggttggtcg

SEQ ID NO: 103806 - DNA, 20 bp, Artificial Sequence
  primer
acctgggtactggtcccaac

SEQ ID NO: 103807 - DNA, 21 bp, Artificial Sequence
  primer
gcaggttcttgatgaaggagg

SEQ ID NO: 103808 - DNA, 21 bp, Artificial Sequence
  primer
tcaccatgaccttgatgatgc

SEQ ID NO: 103809 - DNA, 36 bp, Artificial Sequence
  primer
gtaaaacgacggccagtggtaaagtgaggcccggag

SEQ ID NO: 103810 - DNA, 21 bp, Artificial Sequence
  primer
ctcctctcatctgttccagcc

SEQ ID NO: 103811 - DNA, 21 bp, Artificial Sequence
  primer
atctcctgacgttgtgatccg

SEQ ID NO: 103812 - DNA, 20 bp, Artificial Sequence
  primer
gtcactcaccttgggtcctg

SEQ ID NO: 103813 - DNA, 22 bp, Artificial Sequence
  primer
gctggcatctagtgttctcgac

SEQ ID NO: 103814 - DNA, 21 bp, Artificial Sequence
  primer
caccctgtgtaggaggaaagc

SEQ ID NO: 103815 - DNA, 38 bp, Artificial Sequence
  primer
gtaaaacgacggccagtcctctaccttctgtccatcgg

SEQ ID NO: 103816 - DNA, 21 bp, Artificial Sequence
  primer
aggagctgaagttcgtgtgtg

SEQ ID NO: 103817 - DNA, 21 bp, Artificial Sequence
  primer
aagtttgggatgcatcaggtc

SEQ ID NO: 103818 - DNA, 38 bp, Artificial Sequence
  primer
gtaaaacgacggccagtagtgtttccagaaaggccctc

SEQ ID NO: 103819 - DNA, 38 bp, Artificial Sequence
  primer
gtaaaacgacggccagtaccatggtgacagcagagatg

SEQ ID NO: 103820 - DNA, 38 bp, Artificial Sequence
  primer
gtaaaacgacggccagttgcctgggctttacctctaag

SEQ ID NO: 103821 - DNA, 20 bp, Artificial Sequence
  primer
cttcctcagcagagaatggg

SEQ ID NO: 103822 - DNA, 21 bp, Artificial Sequence
  primer
tgaggtatagccctcacctgg

SEQ ID NO: 103823 - DNA, 21 bp, Artificial Sequence
  primer
agggtgggtatgaggtactcg

SEQ ID NO: 103824 - DNA, 21 bp, Artificial Sequence
  primer
gtcactgctgaagaggagagc

SEQ ID NO: 103825 - DNA, 38 bp, Artificial Sequence
  primer
gtaaaacgacggccagtcaggagggacctcacactttc

SEQ ID NO: 103826 - DNA, 21 bp, Artificial Sequence
  primer
agctcagcataggtgacatgg

SEQ ID NO: 103827 - DNA, 20 bp, Artificial Sequence
  primer
cgttccctttaggaaggtgg

SEQ ID NO: 103828 - DNA, 38 bp, Artificial Sequence
  primer
gtaaaacgacggccagtaggatgaggctgagactctgg

SEQ ID NO: 103829 - DNA, 38 bp, Artificial Sequence
  primer
gtaaaacgacggccagtgacctcctccactgatcttgc

SEQ ID NO: 103830 - DNA, 20 bp, Artificial Sequence
  primer
atgacgaagaccacgtccag

SEQ ID NO: 103831 - DNA, 39 bp, Artificial Sequence
  primer
gtaaaacgacggccagttctggacttctcccatctcatc

SEQ ID NO: 103832 - DNA, 20 bp, Artificial Sequence
  primer
cgcaagttgaggtcatcgtc

SEQ ID NO: 103833 - DNA, 37 bp, Artificial Sequence
  primer
gtaaaacgacggccagtgcacattcatccctcaggtg

SEQ ID NO: 103834 - DNA, 37 bp, Artificial Sequence
  primer
gtaaaacgacggccagtgtgatgctgttcctgcgttc

SEQ ID NO: 103835 - DNA, 21 bp, Artificial Sequence
  primer
gactcgtgcagactgtcgttg

SEQ ID NO: 103836 - DNA, 38 bp, Artificial Sequence
  primer
gtaaaacgacggccagtgccaggctgtcatagtccttc

SEQ ID NO: 103837 - DNA, 20 bp, Artificial Sequence
  primer
aggtaggtcaggagccttgg

SEQ ID NO: 103838 - DNA, 19 bp, Artificial Sequence
  primer
actgagagccagcctgtcg

SEQ ID NO: 103839 - DNA, 20 bp, Artificial Sequence
  primer
agagtgaagagcggcatttg

SEQ ID NO: 103840 - DNA, 22 bp, Artificial Sequence
  primer
ccaattccaagataccaaaccc

SEQ ID NO: 103841 - DNA, 39 bp, Artificial Sequence
  primer
gtaaaacgacggccagtttgcaaacacgttaacatcagc

SEQ ID NO: 103842 - DNA, 37 bp, Artificial Sequence
  primer
gtaaaacgacggccagttgctttaaggccagcagttg

SEQ ID NO: 103843 - DNA, 20 bp, Artificial Sequence
  primer
aacacgctagcctgcttcag

SEQ ID NO: 103844 - DNA, 38 bp, Artificial Sequence
  primer
gtaaaacgacggccagttcatgctggtacccaccttac

SEQ ID NO: 103845 - DNA, 21 bp, Artificial Sequence
  primer
gatgaacaccagggaggagtc

SEQ ID NO: 103846 - DNA, 21 bp, Artificial Sequence
  primer
aaatcatgttcgttgctgctg

SEQ ID NO: 103847 - DNA, 21 bp, Artificial Sequence
  primer
ctcaagctctgccttattcgc

SEQ ID NO: 103848 - DNA, 38 bp, Artificial Sequence
  primer
gtaaaacgacggccagtcagactggcaaactaccctcc

SEQ ID NO: 103849 - DNA, 21 bp, Artificial Sequence
  primer
actctgcagccaggataaacg

SEQ ID NO: 103850 - DNA, 21 bp, Artificial Sequence
  primer
cagcctaccctcaactcatgc

SEQ ID NO: 103851 - DNA, 21 bp, Artificial Sequence
  primer
cttctgttatcctgcttcccg

SEQ ID NO: 103852 - DNA, 38 bp, Artificial Sequence
  primer
gtaaaacgacggccagtgtgaggatgcaaagagttccc

SEQ ID NO: 103853 - DNA, 38 bp, Artificial Sequence
  primer
gtaaaacgacggccagtaaattgagaacaccttgtggc

SEQ ID NO: 103854 - DNA, 21 bp, Artificial Sequence
  primer
ttgaagatgttcctggacacg

SEQ ID NO: 103855 - DNA, 21 bp, Artificial Sequence
  primer
tctcacctggaggtggatagc

SEQ ID NO: 103856 - DNA, 39 bp, Artificial Sequence
  primer
gtaaaacgacggccagttgagttatgatcatgccactgc

SEQ ID NO: 103857 - DNA, 38 bp, Artificial Sequence
  primer
gtaaaacgacggccagtgctctctgaactctcgcactg

SEQ ID NO: 103858 - DNA, 21 bp, Artificial Sequence
  primer
tgcaacactgcagaacctttc

SEQ ID NO: 103859 - DNA, 39 bp, Artificial Sequence
  primer
gtaaaacgacggccagtcgatattcctcactccaacagc

SEQ ID NO: 103860 - DNA, 38 bp, Artificial Sequence
  primer
gtaaaacgacggccagtccagggaccagacagctaaag

SEQ ID NO: 103861 - DNA, 19 bp, Artificial Sequence
  primer
gaagggcttcctcctttcc

SEQ ID NO: 103862 - DNA, 39 bp, Artificial Sequence
  primer
gtaaaacgacggccagtgctgcattagcagagaggtttc

SEQ ID NO: 103863 - DNA, 20 bp, Artificial Sequence
  primer
tatggcaacaaggcagttcc

SEQ ID NO: 103864 - DNA, 38 bp, Artificial Sequence
  primer
gtaaaacgacggccagtcgtctcctccttcatctccac

SEQ ID NO: 103865 - DNA, 20 bp, Artificial Sequence
  primer
ccttcatgcccacatttgtc

SEQ ID NO: 103866 - DNA, 38 bp, Artificial Sequence
  primer
gtaaaacgacggccagtgaatgctgaggtcaagaagcc

SEQ ID NO: 103867 - DNA, 21 bp, Artificial Sequence
  primer
tcgccctaagagggaataagg

SEQ ID NO: 103868 - DNA, 21 bp, Artificial Sequence
  primer
gaagaaccaggcaatcctttg

SEQ ID NO: 103869 - DNA, 21 bp, Artificial Sequence
  primer
gaagcgggcttgatgtatatg

SEQ ID NO: 103870 - DNA, 39 bp, Artificial Sequence
  primer
gtaaaacgacggccagtgcaagagaaccaacacatctcc

SEQ ID NO: 103871 - DNA, 22 bp, Artificial Sequence
  primer
ggctacgttgcagtgttaaagg

SEQ ID NO: 103872 - DNA, 21 bp, Artificial Sequence
  primer
ctgcagagctgtggactaacc

SEQ ID NO: 103873 - DNA, 20 bp, Artificial Sequence
  primer
ctccgaagctttgggttcac

SEQ ID NO: 103874 - DNA, 21 bp, Artificial Sequence
  primer
tggaagtaccaaatgccactg

SEQ ID NO: 103875 - DNA, 21 bp, Artificial Sequence
  primer
aaactctctcagcctgcttgg

SEQ ID NO: 103876 - DNA, 21 bp, Artificial Sequence
  primer
gactgaccaaagagggagagg

SEQ ID NO: 103877 - DNA, 22 bp, Artificial Sequence
  primer
caagtttcagtatttccagccg

SEQ ID NO: 103878 - DNA, 21 bp, Artificial Sequence
  primer
tccagggaatcctctttctcc

SEQ ID NO: 103879 - DNA, 21 bp, Artificial Sequence
  primer
aaggaagggtctttctcaggg

SEQ ID NO: 103880 - DNA, 20 bp, Artificial Sequence
  primer
caggattcccttccttccac

SEQ ID NO: 103881 - DNA, 20 bp, Artificial Sequence
  primer
cagagaggcggtttgacaac

SEQ ID NO: 103882 - DNA, 21 bp, Artificial Sequence
  primer
tctttgatgctttggatgagg

SEQ ID NO: 103883 - DNA, 21 bp, Artificial Sequence
  primer
ccctgtggaaagtagagggtg

SEQ ID NO: 103884 - DNA, 38 bp, Artificial Sequence
  primer
gtaaaacgacggccagtgcaaaggctagttctgttggg

SEQ ID NO: 103885 - DNA, 38 bp, Artificial Sequence
  primer
gtaaaacgacggccagtacgcttaaatgtgttcctggc

SEQ ID NO: 103886 - DNA, 37 bp, Artificial Sequence
  primer
gtaaaacgacggccagtaaggagcatggacgtgtctg

SEQ ID NO: 103887 - DNA, 21 bp, Artificial Sequence
  primer
ttatccgccatcaaagagaag

SEQ ID NO: 103888 - DNA, 21 bp, Artificial Sequence
  primer
agaagtagcccttgcatttgg

SEQ ID NO: 103889 - DNA, 21 bp, Artificial Sequence
  primer
cacgcaggacttactgctgac

SEQ ID NO: 103890 - DNA, 38 bp, Artificial Sequence
  primer
gtaaaacgacggccagtgttccctgcttactctggctc

SEQ ID NO: 103891 - DNA, 38 bp, Artificial Sequence
  primer
gtaaaacgacggccagttcccataaagtcaggaggtgg

SEQ ID NO: 103892 - DNA, 38 bp, Artificial Sequence
  primer
gtaaaacgacggccagttacatgcaggctttgaggaac

SEQ ID NO: 103893 - DNA, 39 bp, Artificial Sequence
  primer
gtaaaacgacggccagttttataagcttaggctgccacc

SEQ ID NO: 103894 - DNA, 38 bp, Artificial Sequence
  primer
gtaaaacgacggccagttaagatgatgttgggctgcac

SEQ ID NO: 103895 - DNA, 40 bp, Artificial Sequence
  primer
gtaaaacgacggccagtttcatgggttgtatttgaacgtc

SEQ ID NO: 103896 - DNA, 38 bp, Artificial Sequence
  primer
gtaaaacgacggccagtagtgcaagggaatctacaccc

SEQ ID NO: 103897 - DNA, 21 bp, Artificial Sequence
  primer
tgcaacactgcagaacctttc

SEQ ID NO: 103898 - DNA, 21 bp, Artificial Sequence
  primer
cccagaattaggaggaatccg

SEQ ID NO: 103899 - DNA, 20 bp, Artificial Sequence
  primer
tgtttctgcaaagacctggc

SEQ ID NO: 103900 - DNA, 21 bp, Artificial Sequence
  primer
ccacagcaaatagcttgaccc

SEQ ID NO: 103901 - DNA, 21 bp, Artificial Sequence
  primer
aagaagaagtcactggtgggc

SEQ ID NO: 103902 - DNA, 38 bp, Artificial Sequence
  primer
gtaaaacgacggccagtggtcaggagcacataggatgg

SEQ ID NO: 103903 - DNA, 21 bp, Artificial Sequence
  primer
cacttggtactcggtcagtgg

SEQ ID NO: 103904 - DNA, 21 bp, Artificial Sequence
  primer
accagggattcatggagtcag

SEQ ID NO: 103905 - DNA, 21 bp, Artificial Sequence
  primer
aaatagggtgctcacggtcac

SEQ ID NO: 103906 - DNA, 38 bp, Artificial Sequence
  primer
gtaaaacgacggccagtcaccaagttccaggaaaggag

SEQ ID NO: 103907 - DNA, 21 bp, Artificial Sequence
  primer
gctccaagcctgcaagataac

SEQ ID NO: 103908 - DNA, 21 bp, Artificial Sequence
  primer
agctctggtcctgttggagag

SEQ ID NO: 103909 - DNA, 21 bp, Artificial Sequence
  primer
gctggaggtacactcagaccc

SEQ ID NO: 103910 - DNA, 38 bp, Artificial Sequence
  primer
gtaaaacgacggccagtagtggagtttccggctctagg

SEQ ID NO: 103911 - DNA, 22 bp, Artificial Sequence
  primer
cctgtgatgtctgtggcagtag

SEQ ID NO: 103912 - DNA, 37 bp, Artificial Sequence
  primer
gtaaaacgacggccagtgaggagggagtgggattctg

SEQ ID NO: 103913 - DNA, 21 bp, Artificial Sequence
  primer
agctccagggctagcaaactc

SEQ ID NO: 103914 - DNA, 20 bp, Artificial Sequence
  primer
ctgggcaatcaggaacacac

SEQ ID NO: 103915 - DNA, 38 bp, Artificial Sequence
  primer
gtaaaacgacggccagttgggcatacagcaatggttag

SEQ ID NO: 103916 - DNA, 21 bp, Artificial Sequence
  primer
ctggtcctttctccaatccag

SEQ ID NO: 103917 - DNA, 38 bp, Artificial Sequence
  primer
gtaaaacgacggccagtaccatcactgtcctcgcctac

SEQ ID NO: 103918 - DNA, 21 bp, Artificial Sequence
  primer
attgaagcatcatgggaggtc

SEQ ID NO: 103919 - DNA, 36 bp, Artificial Sequence
  primer
gtaaaacgacggccagtatccctggaagtgtctgcg

SEQ ID NO: 103920 - DNA, 21 bp, Artificial Sequence
  primer
tgagtggcatgtggtaggaac

SEQ ID NO: 103921 - DNA, 21 bp, Artificial Sequence
  primer
gggtggtcaggagatggtaac

SEQ ID NO: 103922 - DNA, 38 bp, Artificial Sequence
  primer
gtaaaacgacggccagttggtgccaacatgtatctgtg

SEQ ID NO: 103923 - DNA, 21 bp, Artificial Sequence
  primer
caacatcaccacattaagccc

SEQ ID NO: 103924 - DNA, 21 bp, Artificial Sequence
  primer
cctttggacaatacactgggc

SEQ ID NO: 103925 - DNA, 21 bp, Artificial Sequence
  primer
ccactgacactcaacccattc

SEQ ID NO: 103926 - DNA, 21 bp, Artificial Sequence
  primer
ggccctaggaagggtaatcag

SEQ ID NO: 103927 - DNA, 38 bp, Artificial Sequence
  primer
gtaaaacgacggccagtggtctccacactcaccctctc

SEQ ID NO: 103928 - DNA, 19 bp, Artificial Sequence
  primer
cctctgggacttggagctg

SEQ ID NO: 103929 - DNA, 20 bp, Artificial Sequence
  primer
cagaggcagaacagtcggag

SEQ ID NO: 103930 - DNA, 21 bp, Artificial Sequence
  primer
gaaacagagcagagggtggtg

SEQ ID NO: 103931 - DNA, 20 bp, Artificial Sequence
  primer
tcacctccgatgacttgtcc

SEQ ID NO: 103932 - DNA, 21 bp, Artificial Sequence
  primer
ctgtcaccttcatggctgttc

SEQ ID NO: 103933 - DNA, 38 bp, Artificial Sequence
  primer
gtaaaacgacggccagttaatcaaagggtcacaagggc

SEQ ID NO: 103934 - DNA, 21 bp, Artificial Sequence
  primer
agaacagcaggtcagggaatg

SEQ ID NO: 103935 - DNA, 21 bp, Artificial Sequence
  primer
gccaagaactatgaagcccag

SEQ ID NO: 103936 - DNA, 38 bp, Artificial Sequence
  primer
gtaaaacgacggccagtaccctgaaggagaaacacacg

SEQ ID NO: 103937 - DNA, 37 bp, Artificial Sequence
  primer
gtaaaacgacggccagtcaatagctccaggaggtccc

SEQ ID NO: 103938 - DNA, 21 bp, Artificial Sequence
  primer
gacctctgacctggagggaac

SEQ ID NO: 103939 - DNA, 38 bp, Artificial Sequence
  primer
gtaaaacgacggccagtggtcagctggtatgagcattg

SEQ ID NO: 103940 - DNA, 21 bp, Artificial Sequence
  primer
agcagggtcagaggttcaaag

SEQ ID NO: 103941 - DNA, 21 bp, Artificial Sequence
  primer
tagtaccagacagtgccaccc

SEQ ID NO: 103942 - DNA, 38 bp, Artificial Sequence
  primer
gtaaaacgacggccagtagggacaggtcagggagtcac

SEQ ID NO: 103943 - DNA, 38 bp, Artificial Sequence
  primer
gtaaaacgacggccagtcagaagtcacagagtcaccgc

SEQ ID NO: 103944 - DNA, 21 bp, Artificial Sequence
  primer
accatcagtgctagtcccagg

SEQ ID NO: 103945 - DNA, 38 bp, Artificial Sequence
  primer
gtaaaacgacggccagtaccacctcatctccctctgtc

SEQ ID NO: 103946 - DNA, 21 bp, Artificial Sequence
  primer
tcgaagcaagcagttctcaag

SEQ ID NO: 103947 - DNA, 21 bp, Artificial Sequence
  primer
cctcttacatctcgtcctcgg

SEQ ID NO: 103948 - DNA, 38 bp, Artificial Sequence
  primer
gtaaaacgacggccagttctctccaacttcaccctgtg

SEQ ID NO: 103949 - DNA, 38 bp, Artificial Sequence
  primer
gtaaaacgacggccagtacagagaagggtctgagcagc

SEQ ID NO: 103950 - DNA, 20 bp, Artificial Sequence
  primer
ctatgacccgctacactgcc

SEQ ID NO: 103951 - DNA, 21 bp, Artificial Sequence
  primer
gggaatgttggtagccttcag

SEQ ID NO: 103952 - DNA, 36 bp, Artificial Sequence
  primer
gtaaaacgacggccagttgtgtgaaggcacactggc

SEQ ID NO: 103953 - DNA, 39 bp, Artificial Sequence
  primer
gtaaaacgacggccagtggaagtgggagttagtggaagg

SEQ ID NO: 103954 - DNA, 38 bp, Artificial Sequence
  primer
gtaaaacgacggccagtctccctgtggcagagataagc

SEQ ID NO: 103955 - DNA, 21 bp, Artificial Sequence
  primer
aagtgcatcactcacctgtgg

SEQ ID NO: 103956 - DNA, 38 bp, Artificial Sequence
  primer
gtaaaacgacggccagtgagtggtaagaggccaccaag

SEQ ID NO: 103957 - DNA, 21 bp, Artificial Sequence
  primer
gagtggtaagaggccaccaag

SEQ ID NO: 103958 - DNA, 21 bp, Artificial Sequence
  primer
gacacagacaacaggtctcgc

SEQ ID NO: 103959 - DNA, 20 bp, Artificial Sequence
  primer
ggactgagaccctcccaaag

SEQ ID NO: 103960 - DNA, 21 bp, Artificial Sequence
  primer
cagatcactggttggatgtcg

SEQ ID NO: 103961 - DNA, 21 bp, Artificial Sequence
  primer
caacaagagcgaaactccatc

SEQ ID NO: 103962 - DNA, 38 bp, Artificial Sequence
  primer
gtaaaacgacggccagtcgcctgaatctcctttctctc

SEQ ID NO: 103963 - DNA, 37 bp, Artificial Sequence
  primer
gtaaaacgacggccagtgggtccaaggataccaggag

SEQ ID NO: 103964 - DNA, 38 bp, Artificial Sequence
  primer
gtaaaacgacggccagtaaccctgagatacggcagaac

SEQ ID NO: 103965 - DNA, 21 bp, Artificial Sequence
  primer
ctgctaggaaccagcctatgg

SEQ ID NO: 103966 - DNA, 38 bp, Artificial Sequence
  primer
gtaaaacgacggccagtctgctaggaaccagcctatgg

SEQ ID NO: 103967 - DNA, 21 bp, Artificial Sequence
  primer
agagcaccctttagcacttgg

SEQ ID NO: 103968 - DNA, 21 bp, Artificial Sequence
  primer
taccagagctctcatcccagg

SEQ ID NO: 103969 - DNA, 21 bp, Artificial Sequence
  primer
aagagagaatgctggtggctg

SEQ ID NO: 103970 - DNA, 21 bp, Artificial Sequence
  primer
gaaatgcaaatagcgggtgag

SEQ ID NO: 103971 - DNA, 38 bp, Artificial Sequence
  primer
gtaaaacgacggccagtagtcacaggactaaggcaggg

SEQ ID NO: 103972 - DNA, 21 bp, Artificial Sequence
  primer
tctctgtcatagaggcatggg

SEQ ID NO: 103973 - DNA, 37 bp, Artificial Sequence
  primer
gtaaaacgacggccagtgagagaggcctcaccctgtc

SEQ ID NO: 103974 - DNA, 37 bp, Artificial Sequence
  primer
gtaaaacgacggccagtcaccctgaaggcagagtgtc

SEQ ID NO: 103975 - DNA, 21 bp, Artificial Sequence
  primer
aggccttagtttcccagttcc

SEQ ID NO: 103976 - DNA, 20 bp, Artificial Sequence
  primer
acacaagcaggcacacacag

SEQ ID NO: 103977 - DNA, 37 bp, Artificial Sequence
  primer
gtaaaacgacggccagtctatcccagcccttccagac

SEQ ID NO: 103978 - DNA, 38 bp, Artificial Sequence
  primer
gtaaaacgacggccagtagggctcagggattaacacag

SEQ ID NO: 103979 - DNA, 21 bp, Artificial Sequence
  primer
ctgcaaacaacccagagactg

SEQ ID NO: 103980 - DNA, 38 bp, Artificial Sequence
  primer
gtaaaacgacggccagtggaagagaaagttcagggcag

SEQ ID NO: 103981 - DNA, 21 bp, Artificial Sequence
  primer
agaacaagtcggatgtcaggg

SEQ ID NO: 103982 - DNA, 38 bp, Artificial Sequence
  primer
gtaaaacgacggccagtctcctcatatttcaggcccac

SEQ ID NO: 103983 - DNA, 20 bp, Artificial Sequence
  primer
gagcagcgtgaggaactcag

SEQ ID NO: 103984 - DNA, 21 bp, Artificial Sequence
  primer
cttctctccctttgctccagg

SEQ ID NO: 103985 - DNA, 21 bp, Artificial Sequence
  primer
gttccctacttaccggctcac

SEQ ID NO: 103986 - DNA, 38 bp, Artificial Sequence
  primer
gtaaaacgacggccagttgagggtgggtaaactatggg

SEQ ID NO: 103987 - DNA, 36 bp, Artificial Sequence
  primer
gtaaaacgacggccagtacagaatggcaggtgaggg

SEQ ID NO: 103988 - DNA, 21 bp, Artificial Sequence
  primer
agagctcagagtgtggaagcc

SEQ ID NO: 103989 - DNA, 22 bp, Artificial Sequence
  primer
ggcattgacttaccttcacacc

SEQ ID NO: 103990 - DNA, 19 bp, Artificial Sequence
  primer
agggaatggtcaatgcagg

SEQ ID NO: 103991 - DNA, 21 bp, Artificial Sequence
  primer
agaggcagagagtgacttggg

SEQ ID NO: 103992 - DNA, 38 bp, Artificial Sequence
  primer
gtaaaacgacggccagtgtcagagtgaggtgagggtcc

SEQ ID NO: 103993 - DNA, 21 bp, Artificial Sequence
  primer
ggagttcggctgtggagtaag

SEQ ID NO: 103994 - DNA, 38 bp, Artificial Sequence
  primer
gtaaaacgacggccagtaccctggatggtgacattagg

SEQ ID NO: 103995 - DNA, 21 bp, Artificial Sequence
  primer
tagggaggatggcagagagtc

SEQ ID NO: 103996 - DNA, 21 bp, Artificial Sequence
  primer
accctttagtcctgcactccc

SEQ ID NO: 103997 - DNA, 38 bp, Artificial Sequence
  primer
gtaaaacgacggccagttgggttggtttgggtaagaag

SEQ ID NO: 103998 - DNA, 21 bp, Artificial Sequence
  primer
tgggttggtttgggtaagaag

SEQ ID NO: 103999 - DNA, 21 bp, Artificial Sequence
  primer
ctcctaacctcacaccaaggc

SEQ ID NO: 104000 - DNA, 21 bp, Artificial Sequence
  primer
cctgtgagaaacacagatggg

SEQ ID NO: 104001 - DNA, 38 bp, Artificial Sequence
  primer
gtaaaacgacggccagtaagctaccacactggtgggac

SEQ ID NO: 104002 - DNA, 21 bp, Artificial Sequence
  primer
tcccagacacctcactctgtg

SEQ ID NO: 104003 - DNA, 20 bp, Artificial Sequence
  primer
gcccacactcaccatctctc

SEQ ID NO: 104004 - DNA, 38 bp, Artificial Sequence
  primer
gtaaaacgacggccagtcctgtcatgtccactgtccac

SEQ ID NO: 104005 - DNA, 37 bp, Artificial Sequence
  primer
gtaaaacgacggccagtgagccaaccagatgtgatcc

SEQ ID NO: 104006 - DNA, 38 bp, Artificial Sequence
  primer
gtaaaacgacggccagtgaccagcagagccatcatttc

SEQ ID NO: 104007 - DNA, 21 bp, Artificial Sequence
  primer
gatcagagtcaggcaggttgg

SEQ ID NO: 104008 - DNA, 38 bp, Artificial Sequence
  primer
gtaaaacgacggccagtgtcagtgcagcttctcccttc

SEQ ID NO: 104009 - DNA, 21 bp, Artificial Sequence
  primer
cacaggaaggacatagggcac

SEQ ID NO: 104010 - DNA, 21 bp, Artificial Sequence
  primer
cttgactgcttgccctgtaag

SEQ ID NO: 104011 - DNA, 40 bp, Artificial Sequence
  primer
gtaaaacgacggccagtcagtgtctgcagcataactaggg

SEQ ID NO: 104012 - DNA, 37 bp, Artificial Sequence
  primer
gtaaaacgacggccagtatgcagaccctacgtgcttg

SEQ ID NO: 104013 - DNA, 19 bp, Artificial Sequence
  primer
atccagtggcagggaacag

SEQ ID NO: 104014 - DNA, 36 bp, Artificial Sequence
  primer
gtaaaacgacggccagtaggaccctgacctggaacc

SEQ ID NO: 104015 - DNA, 21 bp, Artificial Sequence
  primer
cacagtgagtcatctgccagg

SEQ ID NO: 104016 - DNA, 40 bp, Artificial Sequence
  primer
gtaaaacgacggccagttggttagaacacagtaggcattt

SEQ ID NO: 104017 - DNA, 19 bp, Artificial Sequence
  primer
ctggaggtccttgtggtcc

SEQ ID NO: 104018 - DNA, 18 bp, Artificial Sequence
  primer
ctttggtcctggttgccc

SEQ ID NO: 104019 - DNA, 37 bp, Artificial Sequence
  primer
gtaaaacgacggccagtagggaagcctgtcactcctg

SEQ ID NO: 104020 - DNA, 36 bp, Artificial Sequence
  primer
gtaaaacgacggccagttttcccaatccctggaagg

SEQ ID NO: 104021 - DNA, 21 bp, Artificial Sequence
  primer
ccctacaatcccaccttctcc

SEQ ID NO: 104022 - DNA, 21 bp, Artificial Sequence
  primer
ggattcctggctctcccttag

SEQ ID NO: 104023 - DNA, 38 bp, Artificial Sequence
  primer
gtaaaacgacggccagtccattcttgcctttcttagcc

SEQ ID NO: 104024 - DNA, 38 bp, Artificial Sequence
  primer
gtaaaacgacggccagtgtcgtacgtgtacatcacggg

SEQ ID NO: 104025 - DNA, 38 bp, Artificial Sequence
  primer
gtaaaacgacggccagtaggaggagtggacatactgcc

SEQ ID NO: 104026 - DNA, 38 bp, Artificial Sequence
  primer
gtaaaacgacggccagtcaattacaggctgctgtgtgg

SEQ ID NO: 104027 - DNA, 21 bp, Artificial Sequence
  primer
agaccacctgtgccagctaac

SEQ ID NO: 104028 - DNA, 19 bp, Artificial Sequence
  primer
gctggcccactccattatc

SEQ ID NO: 104029 - DNA, 21 bp, Artificial Sequence
  primer
gactcccacaccgtctactcc

SEQ ID NO: 104030 - DNA, 38 bp, Artificial Sequence
  primer
gtaaaacgacggccagtcttgacgtgcacatggtaagc

SEQ ID NO: 104031 - DNA, 38 bp, Artificial Sequence
  primer
gtaaaacgacggccagtaggagtggatgtactccgtgg

SEQ ID NO: 104032 - DNA, 38 bp, Artificial Sequence
  primer
gtaaaacgacggccagtaagcaagttagtctcctcggg

SEQ ID NO: 104033 - DNA, 22 bp, Artificial Sequence
  primer
tcaccttgaggctcacctactc

SEQ ID NO: 104034 - DNA, 38 bp, Artificial Sequence
  primer
gtaaaacgacggccagtctcagtcttcagtcagccaca

SEQ ID NO: 104035 - DNA, 21 bp, Artificial Sequence
  primer
ctgcaatgtagctgatcccac

SEQ ID NO: 104036 - DNA, 43 bp, Artificial Sequence
  primer
gtaaaacgacggccagtaatccaagaaacattgatcataagaa

SEQ ID NO: 104037 - DNA, 21 bp, Artificial Sequence
  primer
gctgtttggagacttccatcc

SEQ ID NO: 104038 - DNA, 42 bp, Artificial Sequence
  primer
gtaaaacgacggccagtgaacagaaacttgaggattatctgc

SEQ ID NO: 104039 - DNA, 37 bp, Artificial Sequence
  primer
gtaaaacgacggccagtatctgggacatgctgcactc

SEQ ID NO: 104040 - DNA, 38 bp, Artificial Sequence
  primer
gtaaaacgacggccagtagatgggaaagtggtgaggtg

SEQ ID NO: 104041 - DNA, 21 bp, Artificial Sequence
  primer
ctggacttcgataggactcgc

SEQ ID NO: 104042 - DNA, 21 bp, Artificial Sequence
  primer
ctgatcctgcctttaagtggg

SEQ ID NO: 104043 - DNA, 38 bp, Artificial Sequence
  primer
gtaaaacgacggccagtggtgcaaagttgagacccttc

SEQ ID NO: 104044 - DNA, 21 bp, Artificial Sequence
  primer
aggccaagtttagagccacag

SEQ ID NO: 104045 - DNA, 21 bp, Artificial Sequence
  primer
tagttggcttgcaaacactgc

SEQ ID NO: 104046 - DNA, 44 bp, Artificial Sequence
  primer
gtaaaacgacggccagtccataccagatgtcatcaacttatttc

SEQ ID NO: 104047 - DNA, 24 bp, Artificial Sequence
  primer
ccgttagtaggagaataaggtggg

SEQ ID NO: 104048 - DNA, 23 bp, Artificial Sequence
  primer
cagttagggtaatttgctttccc

SEQ ID NO: 104049 - DNA, 21 bp, Artificial Sequence
  primer
aaacagaaccatgcccttgag

SEQ ID NO: 104050 - DNA, 38 bp, Artificial Sequence
  primer
gtaaaacgacggccagtgctctgccatttgagtgaaag

SEQ ID NO: 104051 - DNA, 38 bp, Artificial Sequence
  primer
gtaaaacgacggccagtggcaactggaattgctaggac

SEQ ID NO: 104052 - DNA, 25 bp, Artificial Sequence
  primer
gtcaaatattgatgcatctgcttag

SEQ ID NO: 104053 - DNA, 21 bp, Artificial Sequence
  primer
ggccctgaaatctggtaaatg

SEQ ID NO: 104054 - DNA, 21 bp, Artificial Sequence
  primer
gggcaacaagagtgaaactcc

SEQ ID NO: 104055 - DNA, 21 bp, Artificial Sequence
  primer
ttactgagactcaaggcgtcc

SEQ ID NO: 104056 - DNA, 22 bp, Artificial Sequence
  primer
aattcctctagcaccttcagcc

SEQ ID NO: 104057 - DNA, 21 bp, Artificial Sequence
  primer
cctggcaaaccctaaacacac

SEQ ID NO: 104058 - DNA, 40 bp, Artificial Sequence
  primer
gtaaaacgacggccagtcaacttactttcatcaacagggc

SEQ ID NO: 104059 - DNA, 41 bp, Artificial Sequence
  primer
gtaaaacgacggccagtcagattaggtagcatgtctctccc

SEQ ID NO: 104060 - DNA, 25 bp, Artificial Sequence
  primer
tttgtcaaagtatgctttctgtagc

SEQ ID NO: 104061 - DNA, 21 bp, Artificial Sequence
  primer
gtcttggactagcatgggctc

SEQ ID NO: 104062 - DNA, 38 bp, Artificial Sequence
  primer
gtaaaacgacggccagtgtcttggactagcatgggctc

SEQ ID NO: 104063 - DNA, 37 bp, Artificial Sequence
  primer
gtaaaacgacggccagtatggatgctacaaaccacgc

SEQ ID NO: 104064 - DNA, 39 bp, Artificial Sequence
  primer
gtaaaacgacggccagtcaagctttgtttctcaacatgg

SEQ ID NO: 104065 - DNA, 38 bp, Artificial Sequence
  primer
gtaaaacgacggccagttagtaaacaatgctgcggacc

SEQ ID NO: 104066 - DNA, 21 bp, Artificial Sequence
  primer
atggcaatgtttcctctctgc

SEQ ID NO: 104067 - DNA, 20 bp, Artificial Sequence
  primer
gattgcaccactgcattcac

SEQ ID NO: 104068 - DNA, 21 bp, Artificial Sequence
  primer
ccaggtggctggatttacaag

SEQ ID NO: 104069 - DNA, 37 bp, Artificial Sequence
  primer
gtaaaacgacggccagttttacattgaggctacgggc

SEQ ID NO: 104070 - DNA, 21 bp, Artificial Sequence
  primer
ttgtggtagagcagggtcaag

SEQ ID NO: 104071 - DNA, 21 bp, Artificial Sequence
  primer
attgtgcctggaccttgacac

SEQ ID NO: 104072 - DNA, 38 bp, Artificial Sequence
  primer
gtaaaacgacggccagtcagctttggatggtgtttctc

SEQ ID NO: 104073 - DNA, 36 bp, Artificial Sequence
  primer
gtaaaacgacggccagtcaccatgtatgcacccacc

SEQ ID NO: 104074 - DNA, 36 bp, Artificial Sequence
  primer
gtaaaacgacggccagtcaccacagcgctcacaaag

SEQ ID NO: 104075 - DNA, 38 bp, Artificial Sequence
  primer
gtaaaacgacggccagtccacccgacactcagctactc

SEQ ID NO: 104076 - DNA, 21 bp, Artificial Sequence
  primer
atgaccctgggtgagagtgag

SEQ ID NO: 104077 - DNA, 21 bp, Artificial Sequence
  primer
cagaagcaacgagaaaggctc

SEQ ID NO: 104078 - DNA, 21 bp, Artificial Sequence
  primer
cctcgaagcctttctgttgtc

SEQ ID NO: 104079 - DNA, 21 bp, Artificial Sequence
  primer
aggaccagagaattgcagagc

SEQ ID NO: 104080 - DNA, 38 bp, Artificial Sequence
  primer
gtaaaacgacggccagtacttccagaaagaccacccag

SEQ ID NO: 104081 - DNA, 21 bp, Artificial Sequence
  primer
gacatgaagatggagcttggc

SEQ ID NO: 104082 - DNA, 21 bp, Artificial Sequence
  primer
ttggttggacactggaaacag

SEQ ID NO: 104083 - DNA, 38 bp, Artificial Sequence
  primer
gtaaaacgacggccagtccatctccacgtatccctgac

SEQ ID NO: 104084 - DNA, 37 bp, Artificial Sequence
  primer
gtaaaacgacggccagtatgaccagagacatgccgac

SEQ ID NO: 104085 - DNA, 21 bp, Artificial Sequence
  primer
ttcctgacaatttcagcctcc

SEQ ID NO: 104086 - DNA, 21 bp, Artificial Sequence
  primer
ctgtaggagctccagcctcag

SEQ ID NO: 104087 - DNA, 20 bp, Artificial Sequence
  primer
taggaccttcctcaccctgg

SEQ ID NO: 104088 - DNA, 22 bp, Artificial Sequence
  primer
cagacagcctcacacatacaca

SEQ ID NO: 104089 - DNA, 38 bp, Artificial Sequence
  primer
gtaaaacgacggccagttagcatcccaggcttctcttc

SEQ ID NO: 104090 - DNA, 39 bp, Artificial Sequence
  primer
gtaaaacgacggccagtaaattaaagctccagccagagg

SEQ ID NO: 104091 - DNA, 21 bp, Artificial Sequence
  primer
aagtaatgaagccttcgccag

SEQ ID NO: 104092 - DNA, 21 bp, Artificial Sequence
  primer
tgccatcctatctgcactgag

SEQ ID NO: 104093 - DNA, 21 bp, Artificial Sequence
  primer
actccagaacagagccagtcc

SEQ ID NO: 104094 - DNA, 21 bp, Artificial Sequence
  primer
gtcacaacctcagcagctctc

SEQ ID NO: 104095 - DNA, 20 bp, Artificial Sequence
  primer
gcaccttgtctcctttgacg

SEQ ID NO: 104096 - DNA, 37 bp, Artificial Sequence
  primer
gtaaaacgacggccagtgctccggaaggatctgagtc

SEQ ID NO: 104097 - DNA, 21 bp, Artificial Sequence
  primer
tcaccttctcgcctttctctc

SEQ ID NO: 104098 - DNA, 21 bp, Artificial Sequence
  primer
ggttctccacgtactccttgc

SEQ ID NO: 104099 - DNA, 38 bp, Artificial Sequence
  primer
gtaaaacgacggccagtggttctccacgtactccttgc

SEQ ID NO: 104100 - DNA, 38 bp, Artificial Sequence
  primer
gtaaaacgacggccagtcactcacagccttcctgtctg

SEQ ID NO: 104101 - DNA, 21 bp, Artificial Sequence
  primer
acccttcagagactggactgg

SEQ ID NO: 104102 - DNA, 21 bp, Artificial Sequence
  primer
gtcatcctgagaagggaatgg

SEQ ID NO: 104103 - DNA, 38 bp, Artificial Sequence
  primer
gtaaaacgacggccagtgggtatcaaggactgagctgg

SEQ ID NO: 104104 - DNA, 20 bp, Artificial Sequence
  primer
agatggtttcctggactggg

SEQ ID NO: 104105 - DNA, 35 bp, Artificial Sequence
  primer
gtaaaacgacggccagtcagcgaggacccatcgag

SEQ ID NO: 104106 - DNA, 36 bp, Artificial Sequence
  primer
gtaaaacgacggccagtgtgaaggcactggctgtcc

SEQ ID NO: 104107 - DNA, 19 bp, Artificial Sequence
  primer
ctccggcaggatgagacag

SEQ ID NO: 104108 - DNA, 36 bp, Artificial Sequence
  primer
gtaaaacgacggccagtacaacagcaattagggccg

SEQ ID NO: 104109 - DNA, 38 bp, Artificial Sequence
  primer
gtaaaacgacggccagtttggaactaccagctccttgg

SEQ ID NO: 104110 - DNA, 21 bp, Artificial Sequence
  primer
ctaagatggctcaggtgggtc

SEQ ID NO: 104111 - DNA, 21 bp, Artificial Sequence
  primer
tctccctggagggaagtaaag

SEQ ID NO: 104112 - DNA, 38 bp, Artificial Sequence
  primer
gtaaaacgacggccagtttctaccaacacccaccaagg

SEQ ID NO: 104113 - DNA, 21 bp, Artificial Sequence
  primer
attgactgttcctgggagtgg

SEQ ID NO: 104114 - DNA, 21 bp, Artificial Sequence
  primer
gtctgctctgagctcctgtcc

SEQ ID NO: 104115 - DNA, 20 bp, Artificial Sequence
  primer
aaccagggtccagctttctg

SEQ ID NO: 104116 - DNA, 38 bp, Artificial Sequence
  primer
gtaaaacgacggccagtggtagatatgtgcagggcttg

SEQ ID NO: 104117 - DNA, 37 bp, Artificial Sequence
  primer
gtaaaacgacggccagtggcccatctgaagtctggag

SEQ ID NO: 104118 - DNA, 38 bp, Artificial Sequence
  primer
gtaaaacgacggccagtggattccattggtaagcaccc

SEQ ID NO: 104119 - DNA, 35 bp, Artificial Sequence
  primer
gtaaaacgacggccagtcccagcacgagtcaggag

SEQ ID NO: 104120 - DNA, 38 bp, Artificial Sequence
  primer
gtaaaacgacggccagttgggcaagagagaaatgtgtg

SEQ ID NO: 104121 - DNA, 35 bp, Artificial Sequence
  primer
gtaaaacgacggccagtccttctctcccggagcac

SEQ ID NO: 104122 - DNA, 21 bp, Artificial Sequence
  primer
catgcaaacatacaggcaacc

SEQ ID NO: 104123 - DNA, 21 bp, Artificial Sequence
  primer
aggaaggagagctgtgagtgc

SEQ ID NO: 104124 - DNA, 38 bp, Artificial Sequence
  primer
gtaaaacgacggccagtcctacagggaaaggaaggagg

SEQ ID NO: 104125 - DNA, 37 bp, Artificial Sequence
  primer
gtaaaacgacggccagtggctcagcatagaaggcttg

SEQ ID NO: 104126 - DNA, 19 bp, Artificial Sequence
  primer
aggtcctggctcgtcagtg

SEQ ID NO: 104127 - DNA, 19 bp, Artificial Sequence
  primer
atggccagatttcccactg

SEQ ID NO: 104128 - DNA, 38 bp, Artificial Sequence
  primer
gtaaaacgacggccagtgaggagaaaggaggctcagtg

SEQ ID NO: 104129 - DNA, 19 bp, Artificial Sequence
  primer
gcccacttgctaagggatg

SEQ ID NO: 104130 - DNA, 38 bp, Artificial Sequence
  primer
gtaaaacgacggccagtaggaacagaggaaggtgggtc

SEQ ID NO: 104131 - DNA, 21 bp, Artificial Sequence
  primer
cccgcaaagtaacttccttcc

SEQ ID NO: 104132 - DNA, 38 bp, Artificial Sequence
  primer
gtaaaacgacggccagttgctgggaatctggttgaatc

SEQ ID NO: 104133 - DNA, 38 bp, Artificial Sequence
  primer
gtaaaacgacggccagtccagaagcagcgcctactaac

SEQ ID NO: 104134 - DNA, 21 bp, Artificial Sequence
  primer
acccattcataacccaagcac

SEQ ID NO: 104135 - DNA, 20 bp, Artificial Sequence
  primer
gaggtatgctgtcaggcgac

SEQ ID NO: 104136 - DNA, 23 bp, Artificial Sequence
  primer
gaggaaactagggaggagagaag

SEQ ID NO: 104137 - DNA, 22 bp, Artificial Sequence
  primer
agatggcgagttaattcatgtg

SEQ ID NO: 104138 - DNA, 38 bp, Artificial Sequence
  primer
gtaaaacgacggccagtcacctcggtctctgagtgttg

SEQ ID NO: 104139 - DNA, 39 bp, Artificial Sequence
  primer
gtaaaacgacggccagtccttcttccctttcttctagcc

SEQ ID NO: 104140 - DNA, 21 bp, Artificial Sequence
  primer
tgggagacccttaaactggtg

SEQ ID NO: 104141 - DNA, 38 bp, Artificial Sequence
  primer
gtaaaacgacggccagtctctgtgtcattccatctgcc

SEQ ID NO: 104142 - DNA, 38 bp, Artificial Sequence
  primer
gtaaaacgacggccagtaaagagcatgatgatggaggc

SEQ ID NO: 104143 - DNA, 20 bp, Artificial Sequence
  primer
gggtaagcagatttgctggg

SEQ ID NO: 104144 - DNA, 38 bp, Artificial Sequence
  primer
gtaaaacgacggccagtagtgctgaaggaccactctcc

SEQ ID NO: 104145 - DNA, 38 bp, Artificial Sequence
  primer
gtaaaacgacggccagtgagccagcaactagctccaag

SEQ ID NO: 104146 - DNA, 21 bp, Artificial Sequence
  primer
gtgtccactgtgggatgtgac

SEQ ID NO: 104147 - DNA, 21 bp, Artificial Sequence
  primer
aacttaaggcacagccacagg

SEQ ID NO: 104148 - DNA, 37 bp, Artificial Sequence
  primer
gtaaaacgacggccagtcacccttcacagagggacag

SEQ ID NO: 104149 - DNA, 21 bp, Artificial Sequence
  primer
ccaacccttgatttccagatg

SEQ ID NO: 104150 - DNA, 21 bp, Artificial Sequence
  primer
gggaagagtggttgcctattc

SEQ ID NO: 104151 - DNA, 20 bp, Artificial Sequence
  primer
gagtccctctttgcctggtg

SEQ ID NO: 104152 - DNA, 21 bp, Artificial Sequence
  primer
ggttggctcagtctcaagcac

SEQ ID NO: 104153 - DNA, 21 bp, Artificial Sequence
  primer
actacttgcaaagacgcgatg

SEQ ID NO: 104154 - DNA, 38 bp, Artificial Sequence
  primer
gtaaaacgacggccagtgacctcagagccacaaacacc

SEQ ID NO: 104155 - DNA, 21 bp, Artificial Sequence
  primer
gaggacgctgattattgctga

SEQ ID NO: 104156 - DNA, 37 bp, Artificial Sequence
  primer
gtaaaacgacggccagtaaattgaatgtccttccggg

SEQ ID NO: 104157 - DNA, 38 bp, Artificial Sequence
  primer
gtaaaacgacggccagtctgcaagctctgcactttctc

SEQ ID NO: 104158 - DNA, 39 bp, Artificial Sequence
  primer
gtaaaacgacggccagtgccagggtattattcaaggagg

SEQ ID NO: 104159 - DNA, 39 bp, Artificial Sequence
  primer
gtaaaacgacggccagtgctgaccatgcttggagtctac

SEQ ID NO: 104160 - DNA, 37 bp, Artificial Sequence
  primer
gtaaaacgacggccagtaagtagcagaccctccagcc

SEQ ID NO: 104161 - DNA, 20 bp, Artificial Sequence
  primer
gagtccctctttgcctggtg

SEQ ID NO: 104162 - DNA, 21 bp, Artificial Sequence
  primer
ggttggctcagtctcaagcac

SEQ ID NO: 104163 - DNA, 21 bp, Artificial Sequence
  primer
tctagccactggatgaaaccc

SEQ ID NO: 104164 - DNA, 38 bp, Artificial Sequence
  primer
gtaaaacgacggccagtgaagaaactgttgggagtcgg

SEQ ID NO: 104165 - DNA, 38 bp, Artificial Sequence
  primer
gtaaaacgacggccagtaccagggctgaaacctaattg

SEQ ID NO: 104166 - DNA, 21 bp, Artificial Sequence
  primer
tctttgggtaatgacggatgg

SEQ ID NO: 104167 - DNA, 38 bp, Artificial Sequence
  primer
gtaaaacgacggccagttctggttcaaggtaccacacg

SEQ ID NO: 104168 - DNA, 21 bp, Artificial Sequence
  primer
catcctttcccacttctttcc

SEQ ID NO: 104169 - DNA, 38 bp, Artificial Sequence
  primer
gtaaaacgacggccagtaacatctgtcaaggtgggacc

SEQ ID NO: 104170 - DNA, 38 bp, Artificial Sequence
  primer
gtaaaacgacggccagtgccacatggagtaacatgctc

SEQ ID NO: 104171 - DNA, 38 bp, Artificial Sequence
  primer
gtaaaacgacggccagtaaatctggtcacagagcctgg

SEQ ID NO: 104172 - DNA, 21 bp, Artificial Sequence
  primer
aaagaaagtcacttgcctgcc

SEQ ID NO: 104173 - DNA, 21 bp, Artificial Sequence
  primer
acaaatggaatacgcccaaag

SEQ ID NO: 104174 - DNA, 21 bp, Artificial Sequence
  primer
gtcagccctagggacacaaag

SEQ ID NO: 104175 - DNA, 20 bp, Artificial Sequence
  primer
gaaatttgctgaagggagcc

SEQ ID NO: 104176 - DNA, 39 bp, Artificial Sequence
  primer
gtaaaacgacggccagttgttgctatttcactaagcggg

SEQ ID NO: 104177 - DNA, 21 bp, Artificial Sequence
  primer
tgagaaacagccctgtgaaag

SEQ ID NO: 104178 - DNA, 38 bp, Artificial Sequence
  primer
gtaaaacgacggccagtgtcttccttccaacctccctc

SEQ ID NO: 104179 - DNA, 21 bp, Artificial Sequence
  primer
atttggagaatggacacaccc

SEQ ID NO: 104180 - DNA, 21 bp, Artificial Sequence
  primer
tcaacttctgggtgacagtgg

SEQ ID NO: 104181 - DNA, 21 bp, Artificial Sequence
  primer
ctttggagcaggaagtaagcg

SEQ ID NO: 104182 - DNA, 38 bp, Artificial Sequence; identical to SEQ ID NO: 104178
  primer

SEQ ID NO: 104183 - DNA, 21 bp, Artificial Sequence
  primer
tcaacttctgggtgacagtgg

SEQ ID NO: 104184 - DNA, 21 bp, Artificial Sequence
  primer
ctatccaagtggctttggagc

SEQ ID NO: 104185 - DNA, 36 bp, Artificial Sequence
  primer
gtaaaacgacggccagtctcagttgcttggctgctg

SEQ ID NO: 104186 - DNA, 22 bp, Artificial Sequence
  primer
ggccagtccttaagctctcttc

SEQ ID NO: 104187 - DNA, 38 bp, Artificial Sequence
  primer
gtaaaacgacggccagttatccgcgacattccctagtc

SEQ ID NO: 104188 - DNA, 21 bp, Artificial Sequence
  primer
gggaatagctagggatggtgg

SEQ ID NO: 104189 - DNA, 21 bp, Artificial Sequence
  primer
ccatcagtccatcatcagtcc

SEQ ID NO: 104190 - DNA, 21 bp, Artificial Sequence
  primer
caccatccctgcctgatagac

SEQ ID NO: 104191 - DNA, 21 bp, Artificial Sequence
  primer
gaggatgctggagtcaaggtc

SEQ ID NO: 104192 - DNA, 21 bp, Artificial Sequence
  primer
tgaaacacaaggcatctctgc

SEQ ID NO: 104193 - DNA, 24 bp, Artificial Sequence
  primer
ttccaatttcctataatgagggtg

SEQ ID NO: 104194 - DNA, 21 bp, Artificial Sequence
  primer
cagactgtagaaagccctccc

SEQ ID NO: 104195 - DNA, 38 bp, Artificial Sequence
  primer
gtaaaacgacggccagtctagaaaggtcccaaagcacc

SEQ ID NO: 104196 - DNA, 21 bp, Artificial Sequence
  primer
aaggcaccacaaagtggagag

SEQ ID NO: 104197 - DNA, 21 bp, Artificial Sequence
  primer
cacacaaaggttggtggagac

SEQ ID NO: 104198 - DNA, 21 bp, Artificial Sequence
  primer
ccatcagtccatcatcagtcc

SEQ ID NO: 104199 - DNA, 21 bp, Artificial Sequence
  primer
gagcagtgattgacacttgcc

SEQ ID NO: 104200 - DNA, 21 bp, Artificial Sequence
  primer
tgaaacacaaggcatctctgc

SEQ ID NO: 104201 - DNA, 21 bp, Artificial Sequence
  primer
cagactgtagaaagccctccc

SEQ ID NO: 104202 - DNA, 21 bp, Artificial Sequence
  primer
ctgtccacctgggtatcagtg

SEQ ID NO: 104203 - DNA, 22 bp, Artificial Sequence
  primer
ggattaagacaggatgcagtgg

SEQ ID NO: 104204 - DNA, 20 bp, Artificial Sequence
  primer
ctttcggcttgtgaggacag

SEQ ID NO: 104205 - DNA, 27 bp, Artificial Sequence
  primer
aaatcaagctgaatagacaagctaaca

SEQ ID NO: 104206 - DNA, 20 bp, Artificial Sequence
  primer
caggaagactgaatgcgagg

SEQ ID NO: 104207 - DNA, 21 bp, Artificial Sequence
  primer
ggaccaccgtgactgtagagg

SEQ ID NO: 104208 - DNA, 21 bp, Artificial Sequence
  primer
ccaaatcttccacagaaccag

SEQ ID NO: 104209 - DNA, 21 bp, Artificial Sequence
  primer
cattcacagcttccatcttgc

SEQ ID NO: 104210 - DNA, 40 bp, Artificial Sequence
  primer
gtaaaacgacggccagttttgcctgactctacctctcaac

SEQ ID NO: 104211 - DNA, 22 bp, Artificial Sequence
  primer
gaaaggcaccttgcaagataag

SEQ ID NO: 104212 - DNA, 38 bp, Artificial Sequence
  primer
gtaaaacgacggccagttcagtgtggctaggaatcaca

SEQ ID NO: 104213 - DNA, 44 bp, Artificial Sequence
  primer
gtaaaacgacggccagttgttcttaataattactgttggctcac

SEQ ID NO: 104214 - DNA, 21 bp, Artificial Sequence
  primer
ctgcaatgaaagtcagaaggc

SEQ ID NO: 104215 - DNA, 21 bp, Artificial Sequence
  primer
cgcaataatccgtttctctcc

SEQ ID NO: 104216 - DNA, 22 bp, Artificial Sequence
  primer
ggtacctgccaggactatgatg

SEQ ID NO: 104217 - DNA, 22 bp, Artificial Sequence
  primer
aaacaaagtttcaaaccgcatc

SEQ ID NO: 104218 - DNA, 21 bp, Artificial Sequence
  primer
tctcctgacctcatgatttgc

SEQ ID NO: 104219 - DNA, 36 bp, Artificial Sequence
  primer
gtaaaacgacggccagtccggagacttcctcttccc

SEQ ID NO: 104220 - DNA, 21 bp, Artificial Sequence
  primer
aaagccaaagttctgtctcca

SEQ ID NO: 104221 - DNA, 23 bp, Artificial Sequence
  primer
ccttcccagtaggatttctaggg

SEQ ID NO: 104222 - DNA, 42 bp, Artificial Sequence
  primer
gtaaaacgacggccagtacatgagcttaacttcaattgcttg

SEQ ID NO: 104223 - DNA, 36 bp, Artificial Sequence
  primer
gtaaaacgacggccagtcacgcaacaagaaacgctg

SEQ ID NO: 104224 - DNA, 21 bp, Artificial Sequence
  primer
cctgtaattgttccatgctgc

SEQ ID NO: 104225 - DNA, 42 bp, Artificial Sequence
  primer
gtaaaacgacggccagttccttaaccaatcttcattatctgc

SEQ ID NO: 104226 - DNA, 21 bp, Artificial Sequence
  primer
ccctcttaaccctttcacacg

SEQ ID NO: 104227 - DNA, 21 bp, Artificial Sequence
  primer
ggagaggccagtacaacctcc

SEQ ID NO: 104228 - DNA, 38 bp, Artificial Sequence
  primer
gtaaaacgacggccagtcatggtagcacaggctgagag

SEQ ID NO: 104229 - DNA, 21 bp, Artificial Sequence
  primer
gcctagtgcagagtttcaggg

SEQ ID NO: 104230 - DNA, 21 bp, Artificial Sequence
  primer
cctccctgttgccctattaac

SEQ ID NO: 104231 - DNA, 21 bp, Artificial Sequence
  primer
gtacacctcagggtcacaggg

SEQ ID NO: 104232 - DNA, 21 bp, Artificial Sequence
  primer
ctggactctccatgcactttg

SEQ ID NO: 104233 - DNA, 21 bp, Artificial Sequence
  primer
ctggaacacccttctcctcag

SEQ ID NO: 104234 - DNA, 21 bp, Artificial Sequence
  primer
aggtaatgctgggaaaggtcc

SEQ ID NO: 104235 - DNA, 37 bp, Artificial Sequence
  primer
gtaaaacgacggccagtaccgaaagtcagcaacatgc

SEQ ID NO: 104236 - DNA, 21 bp, Artificial Sequence
  primer
tgccatctcctttaggaccag

SEQ ID NO: 104237 - DNA, 22 bp, Artificial Sequence
  primer
caaacactcactgaagagcctg

SEQ ID NO: 104238 - DNA, 38 bp, Artificial Sequence
  primer
gtaaaacgacggccagtacctgaaacggaagcagaaac

SEQ ID NO: 104239 - DNA, 21 bp, Artificial Sequence
  primer
attacaatggcaacggctacc

SEQ ID NO: 104240 - DNA, 21 bp, Artificial Sequence
  primer
atcaaatggcgcagtacacaa

SEQ ID NO: 104241 - DNA, 21 bp, Artificial Sequence
  primer
ccactacccagttcctgtttg

SEQ ID NO: 104242 - DNA, 21 bp, Artificial Sequence
  primer
acaacatggatgaacctggag

SEQ ID NO: 104243 - DNA, 38 bp, Artificial Sequence
  primer
gtaaaacgacggccagttctagtctctcccaactcccg

SEQ ID NO: 104244 - DNA, 21 bp, Artificial Sequence
  primer
tggcaaattcagagagctgag

SEQ ID NO: 104245 - DNA, 38 bp, Artificial Sequence
  primer
gtaaaacgacggccagtctccagagacagagtcccacc

SEQ ID NO: 104246 - DNA, 22 bp, Artificial Sequence
  primer
aagcaagggatcttaatcagcc

SEQ ID NO: 104247 - DNA, 20 bp, Artificial Sequence
  primer
gagaggcagaggttgtggtg

SEQ ID NO: 104248 - DNA, 21 bp, Artificial Sequence
  primer
tatccagagccatgaaacagc

SEQ ID NO: 104249 - DNA, 38 bp, Artificial Sequence
  primer
gtaaaacgacggccagtcatctttagctggccacactg

SEQ ID NO: 104250 - DNA, 21 bp, Artificial Sequence
  primer
acatgatttgtggtgagcgtc

SEQ ID NO: 104251 - DNA, 38 bp, Artificial Sequence
  primer
gtaaaacgacggccagtcctgtgagtgaagtgcctctc

SEQ ID NO: 104252 - DNA, 18 bp, Artificial Sequence
  primer
ccttcctcctcccttccc

SEQ ID NO: 104253 - DNA, 27 bp, Artificial Sequence
  primer
ctgtttaactggtaatgtgaatgtagg

SEQ ID NO: 104254 - DNA, 27 bp, Artificial Sequence
  primer
tgatatttctttgggataatacattcc

SEQ ID NO: 104255 - DNA, 21 bp, Artificial Sequence
  primer
tgacagagtgagactccaacg

SEQ ID NO: 104256 - DNA, 38 bp, Artificial Sequence
  primer
gtaaaacgacggccagtacacgcagtattcactctgcc

SEQ ID NO: 104257 - DNA, 21 bp, Artificial Sequence
  primer
gaacaagcagcagagttgtgg

SEQ ID NO: 104258 - DNA, 37 bp, Artificial Sequence
  primer
gtaaaacgacggccagtcttggacatggcaatgactg

SEQ ID NO: 104259 - DNA, 38 bp, Artificial Sequence
  primer
gtaaaacgacggccagttgcttatccgggcttcctaag

SEQ ID NO: 104260 - DNA, 42 bp, Artificial Sequence
  primer
gtaaaacgacggccagtttgagactagaatggttcactttgg

SEQ ID NO: 104261 - DNA, 39 bp, Artificial Sequence
  primer
gtaaaacgacggccagtagagatcccaaaccttggagac

SEQ ID NO: 104262 - DNA, 20 bp, Artificial Sequence
  primer
accatcctgcctgttgtcag

SEQ ID NO: 104263 - DNA, 20 bp, Artificial Sequence
  primer
ctacgaacagtccgtgagcc

SEQ ID NO: 104264 - DNA, 20 bp, Artificial Sequence
  primer
tttcgccaaggactccctac

SEQ ID NO: 104265 - DNA, 37 bp, Artificial Sequence
  primer
gtaaaacgacggccagttccctggctctctgtctctg

SEQ ID NO: 104266 - DNA, 38 bp, Artificial Sequence
  primer
gtaaaacgacggccagttaaggaggtagtctggccgtg

SEQ ID NO: 104267 - DNA, 39 bp, Artificial Sequence
  primer
gtaaaacgacggccagtggaggctggaagaggagtttac

SEQ ID NO: 104268 - DNA, 18 bp, Artificial Sequence
  primer
gcactggaaggagccctg

SEQ ID NO: 104269 - DNA, 38 bp, Artificial Sequence
  primer
gtaaaacgacggccagtctgtgggagagtgtaagtggg

SEQ ID NO: 104270 - DNA, 19 bp, Artificial Sequence
  primer
ccctgagttgggcacagtc

SEQ ID NO: 104271 - DNA, 38 bp, Artificial Sequence
  primer
gtaaaacgacggccagtaggatggtctccatctcttga

SEQ ID NO: 104272 - DNA, 20 bp, Artificial Sequence
  primer
caccatggtctttggtccag

SEQ ID NO: 104273 - DNA, 21 bp, Artificial Sequence
  primer
aatgctctaagctgggctgtg

SEQ ID NO: 104274 - DNA, 21 bp, Artificial Sequence
  primer
agagtcctgatgtccgtctcc

SEQ ID NO: 104275 - DNA, 21 bp, Artificial Sequence
  primer
gtctgcatcaaagtcgtcctg

SEQ ID NO: 104276 - DNA, 20 bp, Artificial Sequence
  primer
cctaggcaccctgtcctcag

SEQ ID NO: 104277 - DNA, 20 bp, Artificial Sequence
  primer
ccagagtccacctccacttg

SEQ ID NO: 104278 - DNA, 38 bp, Artificial Sequence
  primer
gtaaaacgacggccagtggctctaagggctgtaaaggg

SEQ ID NO: 104279 - DNA, 21 bp, Artificial Sequence
  primer
aggctcattctaactgccctg

SEQ ID NO: 104280 - DNA, 20 bp, Artificial Sequence
  primer
gatggtgtctgcagggagag

SEQ ID NO: 104281 - DNA, 21 bp, Artificial Sequence
  primer
ctctgagcccttctcacttcc

SEQ ID NO: 104282 - DNA, 20 bp, Artificial Sequence
  primer
tcctgtaagggctttgatgc

SEQ ID NO: 104283 - DNA, 39 bp, Artificial Sequence
  primer
gtaaaacgacggccagttttcagtgaacgtggtgtgaac

SEQ ID NO: 104284 - DNA, 21 bp, Artificial Sequence
  primer
ctctactggaatgcctggctc

SEQ ID NO: 104285 - DNA, 21 bp, Artificial Sequence
  primer
cgaggtgtgctttgcatttag

SEQ ID NO: 104286 - DNA, 21 bp, Artificial Sequence
  primer
ggtgttggattaacctgagcc

SEQ ID NO: 104287 - DNA, 36 bp, Artificial Sequence
  primer
gtaaaacgacggccagtatgcaggtcacccaccttc

SEQ ID NO: 104288 - DNA, 20 bp, Artificial Sequence
  primer
cctgggaccaggacacagac

SEQ ID NO: 104289 - DNA, 19 bp, Artificial Sequence
  primer
aggtcgatcttgtgctccg

SEQ ID NO: 104290 - DNA, 18 bp, Artificial Sequence
  primer
caggcccagtcacagctc

SEQ ID NO: 104291 - DNA, 38 bp, Artificial Sequence
  primer
gtaaaacgacggccagttagcctacgtgactggactgg

SEQ ID NO: 104292 - DNA, 36 bp, Artificial Sequence
  primer
gtaaaacgacggccagtaggaggtcgtgtgtcccag

SEQ ID NO: 104293 - DNA, 21 bp, Artificial Sequence
  primer
caactgggcactacactggaa

SEQ ID NO: 104294 - DNA, 38 bp, Artificial Sequence
  primer
gtaaaacgacggccagttctccctcacttctgctcacc

SEQ ID NO: 104295 - DNA, 20 bp, Artificial Sequence
  primer
ggcccaaaggcagagataag

SEQ ID NO: 104296 - DNA, 21 bp, Artificial Sequence
  primer
ccttcaagcagagctcattcc

SEQ ID NO: 104297 - DNA, 38 bp, Artificial Sequence
  primer
gtaaaacgacggccagttttcgaccaacacctctaccc

SEQ ID NO: 104298 - DNA, 38 bp, Artificial Sequence
  primer
gtaaaacgacggccagtggaatccatgtcaaacaaggc

SEQ ID NO: 104299 - DNA, 21 bp, Artificial Sequence
  primer
caaaggcctgagctctgtatg

SEQ ID NO: 104300 - DNA, 41 bp, Artificial Sequence
  primer
gtaaaacgacggccagttgggttctcaaggatcaaataaag

SEQ ID NO: 104301 - DNA, 23 bp, Artificial Sequence
  primer
ccagattcatatatgggattgcc

SEQ ID NO: 104302 - DNA, 41 bp, Artificial Sequence
  primer
gtaaaacgacggccagttcaacaacctcagaaacaaagatg

SEQ ID NO: 104303 - DNA, 39 bp, Artificial Sequence
  primer
gtaaaacgacggccagtggttcacgcacaatttgatttc

SEQ ID NO: 104304 - DNA, 20 bp, Artificial Sequence
  primer
gaatgggaaggagggtgaag

SEQ ID NO: 104305 - DNA, 24 bp, Artificial Sequence
  primer
tttgtctacatgctgaagatgatg

SEQ ID NO: 104306 - DNA, 22 bp, Artificial Sequence
  primer
gtggctctgagagtccttcttc

SEQ ID NO: 104307 - DNA, 40 bp, Artificial Sequence
  primer
gtaaaacgacggccagtaagagtcttgtttgtgggagttg

SEQ ID NO: 104308 - DNA, 41 bp, Artificial Sequence
  primer
gtaaaacgacggccagtaagataggcagttcacaaatgctc

SEQ ID NO: 104309 - DNA, 39 bp, Artificial Sequence
  primer
gtaaaacgacggccagtcaacagacatgagtgatgtggc

SEQ ID NO: 104310 - DNA, 21 bp, Artificial Sequence
  primer
atacatgagaatcacggctgc

SEQ ID NO: 104311 - DNA, 22 bp, Artificial Sequence
  primer
gccacaagacaaactcacttgg

SEQ ID NO: 104312 - DNA, 21 bp, Artificial Sequence
  primer
tgttggatagggtaagtgccg

SEQ ID NO: 104313 - DNA, 22 bp, Artificial Sequence
  primer
gcacatatatgccaggtaaggc

SEQ ID NO: 104314 - DNA, 21 bp, Artificial Sequence
  primer
ggagtcgggcaagaagtagac

SEQ ID NO: 104315 - DNA, 38 bp, Artificial Sequence
  primer
gtaaaacgacggccagtttctggctaaagaagcaagcc

SEQ ID NO: 104316 - DNA, 22 bp, Artificial Sequence
  primer
gctgcaccaagtaagagacacc

SEQ ID NO: 104317 - DNA, 21 bp, Artificial Sequence
  primer
tgaatattctggctgcacctc

SEQ ID NO: 104318 - DNA, 38 bp, Artificial Sequence
  primer
gtaaaacgacggccagttggtaaccaggtgggagagtg

SEQ ID NO: 104319 - DNA, 21 bp, Artificial Sequence
  primer
actgcaccataaatgactggc

SEQ ID NO: 104320 - DNA, 21 bp, Artificial Sequence
  primer
gtttcatggcctggaagtctg

SEQ ID NO: 104321 - DNA, 20 bp, Artificial Sequence
  primer
cccagaagggctgaccttag

SEQ ID NO: 104322 - DNA, 39 bp, Artificial Sequence
  primer
gtaaaacgacggccagtcaagccaagtgaaactttgtcc

SEQ ID NO: 104323 - DNA, 38 bp, Artificial Sequence
  primer
gtaaaacgacggccagtggaaggcagataacaggaagg

SEQ ID NO: 104324 - DNA, 23 bp, Artificial Sequence
  primer
tctactgggaaaccctagctctg

SEQ ID NO: 104325 - DNA, 21 bp, Artificial Sequence
  primer
gggcagaaggtcaggatacag

SEQ ID NO: 104326 - DNA, 22 bp, Artificial Sequence
  primer
gaggactggtgagatgaggaag

SEQ ID NO: 104327 - DNA, 38 bp, Artificial Sequence
  primer
gtaaaacgacggccagtttgctttgtttcagaggcaag

SEQ ID NO: 104328 - DNA, 23 bp, Artificial Sequence
  primer
ggagatgctctagctttctccag

SEQ ID NO: 104329 - DNA, 22 bp, Artificial Sequence
  primer
tggaaaggcaaggacaattatg

SEQ ID NO: 104330 - DNA, 43 bp, Artificial Sequence
  primer
gtaaaacgacggccagttgagatgttctatttcaaacaaccaa

SEQ ID NO: 104331 - DNA, 38 bp, Artificial Sequence
  primer
gtaaaacgacggccagtaaacacagcccattctaccaa

SEQ ID NO: 104332 - DNA, 38 bp, Artificial Sequence
  primer
gtaaaacgacggccagtagtctgcaagcaaccactttg

SEQ ID NO: 104333 - DNA, 38 bp, Artificial Sequence
  primer
gtaaaacgacggccagtaaactgtagggtggctgctct

SEQ ID NO: 104334 - DNA, 39 bp, Artificial Sequence
  primer
gtaaaacgacggccagtttatgtgcagctacactggctc

SEQ ID NO: 104335 - DNA, 39 bp, Artificial Sequence
  primer
gtaaaacgacggccagttctctctgtgccatgtaaccac

SEQ ID NO: 104336 - DNA, 37 bp, Artificial Sequence
  primer
gtaaaacgacggccagtcaagatgggcaaagcttgag

SEQ ID NO: 104337 - DNA, 38 bp, Artificial Sequence
  primer
gtaaaacgacggccagtgaatgcaatgttcgcactagg

SEQ ID NO: 104338 - DNA, 22 bp, Artificial Sequence
  primer
tctaggcagctgagatttctgg

SEQ ID NO: 104339 - DNA, 38 bp, Artificial Sequence
  primer
gtaaaacgacggccagttttggcttgattgtcctctcc

SEQ ID NO: 104340 - DNA, 25 bp, Artificial Sequence
  primer
tccttcagaatacaggctaaagcag

SEQ ID NO: 104341 - DNA, 38 bp, Artificial Sequence
  primer
gtaaaacgacggccagtaaacatcctccgcttctcaag

SEQ ID NO: 104342 - DNA, 21 bp, Artificial Sequence
  primer
gagtccctcactgttcaatgc

SEQ ID NO: 104343 - DNA, 18 bp, Artificial Sequence
  primer
gtctcaaacacctggccc

SEQ ID NO: 104344 - DNA, 41 bp, Artificial Sequence
  primer
gtaaaacgacggccagttgaggtttaatggacctatcacag

SEQ ID NO: 104345 - DNA, 21 bp, Artificial Sequence
  primer
tactgaaacctgtgcacctcc

SEQ ID NO: 104346 - DNA, 39 bp, Artificial Sequence
  primer
gtaaaacgacggccagttcctctcctcatacaatgtccc

SEQ ID NO: 104347 - DNA, 42 bp, Artificial Sequence
  primer
gtaaaacgacggccagtaaggctaatttgcaagaacagatac

SEQ ID NO: 104348 - DNA, 39 bp, Artificial Sequence
  primer
gtaaaacgacggccagtgcagattccaacattctatggg

SEQ ID NO: 104349 - DNA, 38 bp, Artificial Sequence
  primer
gtaaaacgacggccagtggcaaatatcccagaatgagg

SEQ ID NO: 104350 - DNA, 23 bp, Artificial Sequence
  primer
caatcttgatttaagggaaaggc

SEQ ID NO: 104351 - DNA, 21 bp, Artificial Sequence
  primer
ctcactagcaggctttgcctc

SEQ ID NO: 104352 - DNA, 44 bp, Artificial Sequence
  primer
gtaaaacgacggccagtaaatactttgtaccaacttgagaaagc

SEQ ID NO: 104353 - DNA, 40 bp, Artificial Sequence
  primer
gtaaaacgacggccagttcacaggctcaaggaataaagtc

SEQ ID NO: 104354 - DNA, 38 bp, Artificial Sequence
  primer
gtaaaacgacggccagtttaaaggccgcttggaattag

SEQ ID NO: 104355 - DNA, 39 bp, Artificial Sequence
  primer
gtaaaacgacggccagtttaagagcactgagttgccaca

SEQ ID NO: 104356 - DNA, 41 bp, Artificial Sequence
  primer
gtaaaacgacggccagtcaacaacccaagtcttaactgtcc

SEQ ID NO: 104357 - DNA, 45 bp, Artificial Sequence
  primer
gtaaaacgacggccagtcaattataatgcagagacattacttgct

SEQ ID NO: 104358 - DNA, 24 bp, Artificial Sequence
  primer
tcacctaacagagagctccatttc

SEQ ID NO: 104359 - DNA, 38 bp, Artificial Sequence
  primer
gtaaaacgacggccagtaagagtggactgtggatctgc

SEQ ID NO: 104360 - DNA, 38 bp, Artificial Sequence
  primer
gtaaaacgacggccagtttaacacggagaatcacagcc

SEQ ID NO: 104361 - DNA, 39 bp, Artificial Sequence
  primer
gtaaaacgacggccagtgccatttacagatctgactccc

SEQ ID NO: 104362 - DNA, 21 bp, Artificial Sequence
  primer
taatcgaagagggagagcagg

SEQ ID NO: 104363 - DNA, 41 bp, Artificial Sequence
  primer
gtaaaacgacggccagttccttaaatgctgtctccctacac

SEQ ID NO: 104364 - DNA, 38 bp, Artificial Sequence
  primer
gtaaaacgacggccagttcattgctacaagccagcaac

SEQ ID NO: 104365 - DNA, 21 bp, Artificial Sequence
  primer
attgccacaggaaatcagttg

SEQ ID NO: 104366 - DNA, 38 bp, Artificial Sequence
  primer
gtaaaacgacggccagtagccactaatttgcatttggg

SEQ ID NO: 104367 - DNA, 22 bp, Artificial Sequence
  primer
ttctctccagggttcattcttc

SEQ ID NO: 104368 - DNA, 22 bp, Artificial Sequence
  primer
ggattctgctgctttctgattg

SEQ ID NO: 104369 - DNA, 38 bp, Artificial Sequence
  primer
gtaaaacgacggccagttgaacttggcctaaatcccag

SEQ ID NO: 104370 - DNA, 21 bp, Artificial Sequence
  primer
gcaatggagcgaaactctgtc

SEQ ID NO: 104371 - DNA, 38 bp, Artificial Sequence
  primer
gtaaaacgacggccagtagaggcctacgtatcctccag

SEQ ID NO: 104372 - DNA, 21 bp, Artificial Sequence
  primer
ccagtggtccacagcatttac

SEQ ID NO: 104373 - DNA, 22 bp, Artificial Sequence
  primer
cctcactgaactgtggaagagg

SEQ ID NO: 104374 - DNA, 38 bp, Artificial Sequence
  primer
gtaaaacgacggccagtatcaagaagctgtgacccagg

SEQ ID NO: 104375 - DNA, 21 bp, Artificial Sequence
  primer
ccacccaggttcataaccaac

SEQ ID NO: 104376 - DNA, 38 bp, Artificial Sequence
  primer
gtaaaacgacggccagttttcagcaccacctttctctg

SEQ ID NO: 104377 - DNA, 39 bp, Artificial Sequence
  primer
gtaaaacgacggccagtagtaatgacagcaccacagacg

SEQ ID NO: 104378 - DNA, 21 bp, Artificial Sequence
  primer
aagtcgcttggctgtgagaag

SEQ ID NO: 104379 - DNA, 37 bp, Artificial Sequence
  primer
gtaaaacgacggccagtgctgactgggccttagaagc

SEQ ID NO: 104380 - DNA, 37 bp, Artificial Sequence
  primer
gtaaaacgacggccagtacagggtttgtgagggaggt

SEQ ID NO: 104381 - DNA, 21 bp, Artificial Sequence
  primer
gagacaggtggagggagagag

SEQ ID NO: 104382 - DNA, 38 bp, Artificial Sequence
  primer
gtaaaacgacggccagtgtggaacaccctggagttgag

SEQ ID NO: 104383 - DNA, 21 bp, Artificial Sequence
  primer
ttacaagagtgagacagccgc

SEQ ID NO: 104384 - DNA, 21 bp, Artificial Sequence
  primer
tttctcccgtgttgctcttta

SEQ ID NO: 104385 - DNA, 20 bp, Artificial Sequence
  primer
cccagagctgagctgttgtc

SEQ ID NO: 104386 - DNA, 21 bp, Artificial Sequence
  primer
tgcaagacatctccttgatgg

SEQ ID NO: 104387 - DNA, 21 bp, Artificial Sequence
  primer
gcagtggtaacagggaagctg

SEQ ID NO: 104388 - DNA, 38 bp, Artificial Sequence
  primer
gtaaaacgacggccagtggagatccagtcagtccttgg

SEQ ID NO: 104389 - DNA, 18 bp, Artificial Sequence
  primer
gtggcgctgcactctagc

SEQ ID NO: 104390 - DNA, 38 bp, Artificial Sequence
  primer
gtaaaacgacggccagtgacgaaaggattaaagcctgc

SEQ ID NO: 104391 - DNA, 21 bp, Artificial Sequence
  primer
gcttcatacaccaccatctcg

SEQ ID NO: 104392 - DNA, 21 bp, Artificial Sequence
  primer
agatggaactaacagcagccc

SEQ ID NO: 104393 - DNA, 21 bp, Artificial Sequence
  primer
ctacatttgatggtttggccc

SEQ ID NO: 104394 - DNA, 21 bp, Artificial Sequence
  primer
caggactacgcacatttctcg

SEQ ID NO: 104395 - DNA, 21 bp, Artificial Sequence
  primer
agtttaaagggttgcaggcac

SEQ ID NO: 104396 - DNA, 38 bp, Artificial Sequence
  primer
gtaaaacgacggccagtgcttgtgcagcaagaacactg

SEQ ID NO: 104397 - DNA, 21 bp, Artificial Sequence
  primer
ccaattgtcacatctggttgg

SEQ ID NO: 104398 - DNA, 38 bp, Artificial Sequence
  primer
gtaaaacgacggccagtagcatcttgcctctgatttcc

SEQ ID NO: 104399 - DNA, 38 bp, Artificial Sequence
  primer
gtaaaacgacggccagtttaggttagtggctttgcagc

SEQ ID NO: 104400 - DNA, 21 bp, Artificial Sequence
  primer
catctcaagggcctagcactc

SEQ ID NO: 104401 - DNA, 20 bp, Artificial Sequence
  primer
acccatgaccctacaggacc

SEQ ID NO: 104402 - DNA, 38 bp, Artificial Sequence
  primer
gtaaaacgacggccagtgggactgaaatcaaggagctg

SEQ ID NO: 104403 - DNA, 39 bp, Artificial Sequence
  primer
gtaaaacgacggccagtcactgtcagttcctgaagggag

SEQ ID NO: 104404 - DNA, 38 bp, Artificial Sequence
  primer
gtaaaacgacggccagtatcttatctgccctttgtgcc

SEQ ID NO: 104405 - DNA, 21 bp, Artificial Sequence
  primer
cagccaaggtagggaggaaac

SEQ ID NO: 104406 - DNA, 39 bp, Artificial Sequence
  primer
gtaaaacgacggccagttcaatacagaagcttgggaagg

SEQ ID NO: 104407 - DNA, 37 bp, Artificial Sequence
  primer
gtaaaacgacggccagtatgtcgtgatcacagcagcc

SEQ ID NO: 104408 - DNA, 43 bp, Artificial Sequence
  primer
gtaaaacgacggccagttcaacctgtatatgtcatagtcctcg

SEQ ID NO: 104409 - DNA, 38 bp, Artificial Sequence
  primer
gtaaaacgacggccagtaacatttcaagcaatgctccc

SEQ ID NO: 104410 - DNA, 39 bp, Artificial Sequence
  primer
gtaaaacgacggccagttcagataaggatggctttcaca

SEQ ID NO: 104411 - DNA, 21 bp, Artificial Sequence
  primer
ctgcaagcaatgtaccctcac

SEQ ID NO: 104412 - DNA, 21 bp, Artificial Sequence
  primer
agtactggtctgaagccctgg

SEQ ID NO: 104413 - DNA, 38 bp, Artificial Sequence
  primer
gtaaaacgacggccagttagggaatcgatacactgccc

SEQ ID NO: 104414 - DNA, 23 bp, Artificial Sequence
  primer
catctgtaaagttagcactgccc

SEQ ID NO: 104415 - DNA, 21 bp, Artificial Sequence
  primer
gagggttagtccaggtcctcc

SEQ ID NO: 104416 - DNA, 21 bp, Artificial Sequence
  primer
gagagaggctgtaaacggcac

SEQ ID NO: 104417 - DNA, 39 bp, Artificial Sequence
  primer
gtaaaacgacggccagtttgtgctgcctaatgctaactg

SEQ ID NO: 104418 - DNA, 36 bp, Artificial Sequence
  primer
gtaaaacgacggccagttcccaactgcagagcagac

SEQ ID NO: 104419 - DNA, 25 bp, Artificial Sequence
  primer
tttccatctataaagaacaaagccc

SEQ ID NO: 104420 - DNA, 37 bp, Artificial Sequence
  primer
gtaaaacgacggccagttttccaagctgcaagaaagc

SEQ ID NO: 104421 - DNA, 20 bp, Artificial Sequence
  primer
ctgggtgacagagccatacc

SEQ ID NO: 104422 - DNA, 42 bp, Artificial Sequence
  primer
gtaaaacgacggccagttctgtaacttgaatactactggccc

SEQ ID NO: 104423 - DNA, 21 bp, Artificial Sequence
  primer
tacggcttggcctaaacacag

SEQ ID NO: 104424 - DNA, 19 bp, Artificial Sequence
  primer
gacacaggtgcattcgtgc

SEQ ID NO: 104425 - DNA, 22 bp, Artificial Sequence
  primer
cccatccaatgacagcatttag

SEQ ID NO: 104426 - DNA, 21 bp, Artificial Sequence
  primer
gggctatacagcaagaccctg

SEQ ID NO: 104427 - DNA, 44 bp, Artificial Sequence
  primer
gtaaaacgacggccagttgaataatcaagaatccaattgttacc

SEQ ID NO: 104428 - DNA, 38 bp, Artificial Sequence
  primer
gtaaaacgacggccagttttcaggacacatcaaccgac

SEQ ID NO: 104429 - DNA, 38 bp, Artificial Sequence
  primer
gtaaaacgacggccagtcgatcctgccctgatctaaac

SEQ ID NO: 104430 - DNA, 38 bp, Artificial Sequence
  primer
gtaaaacgacggccagtagtcccagctactcaagaggc

SEQ ID NO: 104431 - DNA, 21 bp, Artificial Sequence
  primer
tttgttagctgatggcaaagc

SEQ ID NO: 104432 - DNA, 21 bp, Artificial Sequence
  primer
ctgcctgagcttacagcaatg

SEQ ID NO: 104433 - DNA, 20 bp, Artificial Sequence
  primer
atatcgccaacttgcctgtg

SEQ ID NO: 104434 - DNA, 22 bp, Artificial Sequence
  primer
tctagccacaaacctatgggag

SEQ ID NO: 104435 - DNA, 24 bp, Artificial Sequence
  primer
tgaagctgctaggagagctaaatc

SEQ ID NO: 104436 - DNA, 21 bp, Artificial Sequence
  primer
tccctgtacctgcttcctcag

SEQ ID NO: 104437 - DNA, 37 bp, Artificial Sequence
  primer
gtaaaacgacggccagttcacgtggtcaggagtttga

SEQ ID NO: 104438 - DNA, 37 bp, Artificial Sequence
  primer
gtaaaacgacggccagtgtaacccgtctccagggttc

SEQ ID NO: 104439 - DNA, 21 bp, Artificial Sequence
  primer
attccaggaaccaccctaagc

SEQ ID NO: 104440 - DNA, 21 bp, Artificial Sequence
  primer
tagtctccaggtgacacaggc

SEQ ID NO: 104441 - DNA, 21 bp, Artificial Sequence
  primer
agtctatagcctcgaaggccc

SEQ ID NO: 104442 - DNA, 24 bp, Artificial Sequence
  primer
ccaggatttgaatccaaactattc

SEQ ID NO: 104443 - DNA, 37 bp, Artificial Sequence
  primer
gtaaaacgacggccagtaaatgtcgtttggcacactg

SEQ ID NO: 104444 - DNA, 23 bp, Artificial Sequence
  primer
tctccacagcacttatcaccttc

SEQ ID NO: 104445 - DNA, 40 bp, Artificial Sequence
  primer
gtaaaacgacggccagtgcatctatcagatgtcctggaac

SEQ ID NO: 104446 - DNA, 28 bp, Artificial Sequence
  primer
ccataactgtattatgaagacatccttt

SEQ ID NO: 104447 - DNA, 21 bp, Artificial Sequence
  primer
ctgggtgacagagcaagactc

SEQ ID NO: 104448 - DNA, 26 bp, Artificial Sequence
  primer
tctgttgttgtttccaacatttattt

SEQ ID NO: 104449 - DNA, 40 bp, Artificial Sequence
  primer
gtaaaacgacggccagttgagtcaaaggaaactgtccaac

SEQ ID NO: 104450 - DNA, 39 bp, Artificial Sequence
  primer
gtaaaacgacggccagttgcaaatgctttggagatagtg

SEQ ID NO: 104451 - DNA, 21 bp, Artificial Sequence
  primer
ccaagacgcatattctgtccc

SEQ ID NO: 104452 - DNA, 21 bp, Artificial Sequence
  primer
gcaacagagtgagtccctgtc

SEQ ID NO: 104453 - DNA, 41 bp, Artificial Sequence
  primer
gtaaaacgacggccagtttgaaacctaggcagactgatacc

SEQ ID NO: 104454 - DNA, 21 bp, Artificial Sequence
  primer
tgatcatgcctgtgaatagcc

SEQ ID NO: 104455 - DNA, 38 bp, Artificial Sequence
  primer
gtaaaacgacggccagtaatcctctcactgtggcttcc

SEQ ID NO: 104456 - DNA, 37 bp, Artificial Sequence
  primer
gtaaaacgacggccagtaccctagccctggtgtcttg

SEQ ID NO: 104457 - DNA, 43 bp, Artificial Sequence
  primer
gtaaaacgacggccagtaactaacttgagccataaggaatctg

SEQ ID NO: 104458 - DNA, 44 bp, Artificial Sequence
  primer
gtaaaacgacggccagttttaggacacttcagagcaccttatac

SEQ ID NO: 104459 - DNA, 21 bp, Artificial Sequence
  primer
cagggaaagatgttgctgctc

SEQ ID NO: 104460 - DNA, 38 bp, Artificial Sequence
  primer
gtaaaacgacggccagttcagtgggaaccatgtattgg

SEQ ID NO: 104461 - DNA, 21 bp, Artificial Sequence
  primer
tctcctgtttctttccaaccc

SEQ ID NO: 104462 - DNA, 37 bp, Artificial Sequence
  primer
gtaaaacgacggccagtatgcacaggaagtcagtgcc

SEQ ID NO: 104463 - DNA, 38 bp, Artificial Sequence
  primer
gtaaaacgacggccagttgtgaaggagacggagaaacc

SEQ ID NO: 104464 - DNA, 21 bp, Artificial Sequence
  primer
agctcagcaaacagcattgtg

SEQ ID NO: 104465 - DNA, 21 bp, Artificial Sequence
  primer
actccaagatgagcttgacgc

SEQ ID NO: 104466 - DNA, 22 bp, Artificial Sequence
  primer
cgcaggatctcatgattaaagg

SEQ ID NO: 104467 - DNA, 21 bp, Artificial Sequence
  primer
acagaaaggaccagttcctcg

SEQ ID NO: 104468 - DNA, 21 bp, Artificial Sequence
  primer
gcggtttctctcaaggaagtg

SEQ ID NO: 104469 - DNA, 21 bp, Artificial Sequence
  primer
tggttacttctgcaagttggc

SEQ ID NO: 104470 - DNA, 21 bp, Artificial Sequence
  primer
ggtcttgaccctgaccctatg

SEQ ID NO: 104471 - DNA, 20 bp, Artificial Sequence
  primer
cacggtctagacaagggctg

SEQ ID NO: 104472 - DNA, 21 bp, Artificial Sequence
  primer
catttcccttcatcctcttgg

SEQ ID NO: 104473 - DNA, 38 bp, Artificial Sequence
  primer
gtaaaacgacggccagtggttgtctgctacagccactg

SEQ ID NO: 104474 - DNA, 38 bp, Artificial Sequence
  primer
gtaaaacgacggccagtaaatgaggacagtgaggtccc

SEQ ID NO: 104475 - DNA, 38 bp, Artificial Sequence
  primer
gtaaaacgacggccagttgacctacatttgcctcctcc

SEQ ID NO: 104476 - DNA, 40 bp, Artificial Sequence
  primer
gtaaaacgacggccagtagcactgaaattctttggaaacc

SEQ ID NO: 104477 - DNA, 38 bp, Artificial Sequence
  primer
gtaaaacgacggccagtaggaacattccctttgtgagg

SEQ ID NO: 104478 - DNA, 21 bp, Artificial Sequence
  primer
gctgagtcaatcacttctggg

SEQ ID NO: 104479 - DNA, 20 bp, Artificial Sequence
  primer
tcagctgacaccagggaatc

SEQ ID NO: 104480 - DNA, 21 bp, Artificial Sequence
  primer
cagaacaccaagagcaggagc

SEQ ID NO: 104481 - DNA, 20 bp, Artificial Sequence
  primer
gcaggtctggaactcactgc

SEQ ID NO: 104482 - DNA, 20 bp, Artificial Sequence
  primer
cgttaccctggaaactggtg

SEQ ID NO: 104483 - DNA, 22 bp, Artificial Sequence
  primer
ttgtgcctatgtttagtggtgc

SEQ ID NO: 104484 - DNA, 22 bp, Artificial Sequence
  primer
tggctcagctgtttaactaggg

SEQ ID NO: 104485 - DNA, 43 bp, Artificial Sequence
  primer
gtaaaacgacggccagtgatttattacttcaacactgcagcac

SEQ ID NO: 104486 - DNA, 40 bp, Artificial Sequence
  primer
gtaaaacgacggccagtttctgttccaagtgtttcagagg

SEQ ID NO: 104487 - DNA, 22 bp, Artificial Sequence
  primer
aagctcagttacaaatggctcc

SEQ ID NO: 104488 - DNA, 22 bp, Artificial Sequence
  primer
gcccagtttcactcttgtaacc

SEQ ID NO: 104489 - DNA, 26 bp, Artificial Sequence
  primer
gagaactgtttcaacaactattcagc

SEQ ID NO: 104490 - DNA, 21 bp, Artificial Sequence
  primer
ttacccggaactctctttccc

SEQ ID NO: 104491 - DNA, 21 bp, Artificial Sequence
  primer
cctgggtgataagagcgaaac

SEQ ID NO: 104492 - DNA, 21 bp, Artificial Sequence
  primer
agctaacagccaaccttccag

SEQ ID NO: 104493 - DNA, 39 bp, Artificial Sequence
  primer
gtaaaacgacggccagttggtgggatctctgacaacttc

SEQ ID NO: 104494 - DNA, 21 bp, Artificial Sequence
  primer
ctgggcctgaagaatggttac

SEQ ID NO: 104495 - DNA, 21 bp, Artificial Sequence
  primer
atcattgttcactctgtcccg

SEQ ID NO: 104496 - DNA, 39 bp, Artificial Sequence
  primer
gtaaaacgacggccagtaagggaagagaaaggctgaatg

SEQ ID NO: 104497 - DNA, 38 bp, Artificial Sequence
  primer
gtaaaacgacggccagtctggaataagagggagccaag

SEQ ID NO: 104498 - DNA, 20 bp, Artificial Sequence
  primer
accctgagagcatcgattgg

SEQ ID NO: 104499 - DNA, 37 bp, Artificial Sequence
  primer
gtaaaacgacggccagtgtgacacaaagttcccagcc

SEQ ID NO: 104500 - DNA, 21 bp, Artificial Sequence
  primer
acaaggcaggaggatgagaag

SEQ ID NO: 104501 - DNA, 38 bp, Artificial Sequence
  primer
gtaaaacgacggccagtgcctctgaagaaagggaaatg

SEQ ID NO: 104502 - DNA, 38 bp, Artificial Sequence
  primer
gtaaaacgacggccagtggttcccaaggaaactaaggg

SEQ ID NO: 104503 - DNA, 21 bp, Artificial Sequence
  primer
agcacagccctactttcgttc

SEQ ID NO: 104504 - DNA, 21 bp, Artificial Sequence
  primer
tggtcagagttctagccatgc

SEQ ID NO: 104505 - DNA, 21 bp, Artificial Sequence
  primer
aacaagtgtgtcagcccagtg

SEQ ID NO: 104506 - DNA, 21 bp, Artificial Sequence
  primer
atgacctgtcactgcctcatc

SEQ ID NO: 104507 - DNA, 37 bp, Artificial Sequence
  primer
gtaaaacgacggccagtgccaaacctttgcatctcag

SEQ ID NO: 104508 - DNA, 38 bp, Artificial Sequence
  primer
gtaaaacgacggccagtagctctacgttagctcccagg

SEQ ID NO: 104509 - DNA, 21 bp, Artificial Sequence
  primer
aatcttgcccaccgatgatac

SEQ ID NO: 104510 - DNA, 23 bp, Artificial Sequence
  primer
agggaaatacttgacacatggac

SEQ ID NO: 104511 - DNA, 35 bp, Artificial Sequence
  primer
gtaaaacgacggccagttgggtgacggagcaagac

SEQ ID NO: 104512 - DNA, 38 bp, Artificial Sequence
  primer
gtaaaacgacggccagttttcaaattggaacaggagcc

SEQ ID NO: 104513 - DNA, 37 bp, Artificial Sequence
  primer
gtaaaacgacggccagtgactcggaggctgctacttg

SEQ ID NO: 104514 - DNA, 38 bp, Artificial Sequence
  primer
gtaaaacgacggccagtaggttctcatttccatcacgc

SEQ ID NO: 104515 - DNA, 39 bp, Artificial Sequence
  primer
gtaaaacgacggccagtggtcactgaatgatcttgttgc

SEQ ID NO: 104516 - DNA, 23 bp, Artificial Sequence
  primer
tcttaactcctttggctgaaagc

SEQ ID NO: 104517 - DNA, 26 bp, Artificial Sequence
  primer
gactgatttgtcatttcatctttacc

SEQ ID NO: 104518 - DNA, 21 bp, Artificial Sequence
  primer
agccatggaactgtgaatgac

SEQ ID NO: 104519 - DNA, 38 bp, Artificial Sequence
  primer
gtaaaacgacggccagtccttgccaggtaaacacagag

SEQ ID NO: 104520 - DNA, 38 bp, Artificial Sequence
  primer
gtaaaacgacggccagtgtccctggtttctgtgacaag

SEQ ID NO: 104521 - DNA, 23 bp, Artificial Sequence
  primer
ggtttacaatggagagagatggg

SEQ ID NO: 104522 - DNA, 43 bp, Artificial Sequence
  primer
gtaaaacgacggccagtaagctatctctgaatctgaatgaagg

SEQ ID NO: 104523 - DNA, 22 bp, Artificial Sequence
  primer
ccaaagcaaacttaatgtgcag

SEQ ID NO: 104524 - DNA, 42 bp, Artificial Sequence
  primer
gtaaaacgacggccagttttgttgaaagaataaatgaggcac

SEQ ID NO: 104525 - DNA, 21 bp, Artificial Sequence
  primer
tataccttgcctgctggactg

SEQ ID NO: 104526 - DNA, 21 bp, Artificial Sequence
  primer
catctgttatctgcttggccc

SEQ ID NO: 104527 - DNA, 44 bp, Artificial Sequence
  primer
gtaaaacgacggccagtcatgattctctctcaaaggataaattg

SEQ ID NO: 104528 - DNA, 20 bp, Artificial Sequence
  primer
ggaggtggtgcgagtatagc

SEQ ID NO: 104529 - DNA, 21 bp, Artificial Sequence
  primer
ccgacctaggctatgttccag

SEQ ID NO: 104530 - DNA, 21 bp, Artificial Sequence
  primer
gtgcaaccatatgtagccagg

SEQ ID NO: 104531 - DNA, 20 bp, Artificial Sequence
  primer
gaagagcactcctgccaatg

SEQ ID NO: 104532 - DNA, 20 bp, Artificial Sequence
  primer
agagggtggtggagataggc

SEQ ID NO: 104533 - DNA, 38 bp, Artificial Sequence
  primer
gtaaaacgacggccagtacttctaagagccctggtccc

SEQ ID NO: 104534 - DNA, 22 bp, Artificial Sequence
  primer
aacaaaggtagtcaagggagcc

SEQ ID NO: 104535 - DNA, 21 bp, Artificial Sequence
  primer
ctgcacagacaacaacactgg

SEQ ID NO: 104536 - DNA, 37 bp, Artificial Sequence
  primer
gtaaaacgacggccagtcatcttccgcctcgtgttag

SEQ ID NO: 104537 - DNA, 38 bp, Artificial Sequence
  primer
gtaaaacgacggccagtatcatcttcaacctgcccatc

SEQ ID NO: 104538 - DNA, 20 bp, Artificial Sequence
  primer
tacttgggaggcagatgtgg

SEQ ID NO: 104539 - DNA, 38 bp, Artificial Sequence
  primer
gtaaaacgacggccagtttcagaactggctgacctctg

SEQ ID NO: 104540 - DNA, 38 bp, Artificial Sequence
  primer
gtaaaacgacggccagtggaaagatgataaagccaggg

SEQ ID NO: 104541 - DNA, 21 bp, Artificial Sequence
  primer
ctctgctgctgtctcatttgc

SEQ ID NO: 104542 - DNA, 21 bp, Artificial Sequence
  primer
gtcgcgagacctgagaaattg

SEQ ID NO: 104543 - DNA, 38 bp, Artificial Sequence
  primer
gtaaaacgacggccagtagtgagctccctccttgtcag

SEQ ID NO: 104544 - DNA, 21 bp, Artificial Sequence
  primer
acttggagaaagtggactccg

SEQ ID NO: 104545 - DNA, 41 bp, Artificial Sequence
  primer
gtaaaacgacggccagtcatcagaggatttctttatggtgg

SEQ ID NO: 104546 - DNA, 38 bp, Artificial Sequence
  primer
gtaaaacgacggccagtgctggcctgaataggtactgg

SEQ ID NO: 104547 - DNA, 21 bp, Artificial Sequence
  primer
agaaatctctgccaggctacg

SEQ ID NO: 104548 - DNA, 21 bp, Artificial Sequence
  primer
ggaacttacaaacagcctggg

SEQ ID NO: 104549 - DNA, 20 bp, Artificial Sequence
  primer
agattgcacagtgagccaag

SEQ ID NO: 104550 - DNA, 19 bp, Artificial Sequence
  primer
aagcggatggactctgtgg

SEQ ID NO: 104551 - DNA, 21 bp, Artificial Sequence
  primer
actccctcttgctactgtggg

SEQ ID NO: 104552 - DNA, 21 bp, Artificial Sequence
  primer
tgggcgataagaccaagactc

SEQ ID NO: 104553 - DNA, 38 bp, Artificial Sequence
  primer
gtaaaacgacggccagtcaggcccattaagcaaagaag

SEQ ID NO: 104554 - DNA, 38 bp, Artificial Sequence; identical to SEQ ID NO: 104543
  primer

SEQ ID NO: 104555 - DNA, 38 bp, Artificial Sequence
  primer
gtaaaacgacggccagtctcttcgacccaaacctcaag

SEQ ID NO: 104556 - DNA, 20 bp, Artificial Sequence
  primer
ctagggaacgcttgacctcc

SEQ ID NO: 104557 - DNA, 21 bp, Artificial Sequence
  primer
aggcagtcaatttaacctcgg

SEQ ID NO: 104558 - DNA, 39 bp, Artificial Sequence
  primer
gtaaaacgacggccagtgctcacctttaaactgaggcac

SEQ ID NO: 104559 - DNA, 38 bp, Artificial Sequence
  primer
gtaaaacgacggccagttttctggcaacagaaacctcc

SEQ ID NO: 104560 - DNA, 21 bp, Artificial Sequence
  primer
aacttgaacaaggctggtgac

SEQ ID NO: 104561 - DNA, 20 bp, Artificial Sequence
  primer
atgcccttcacctcaccttg

SEQ ID NO: 104562 - DNA, 21 bp, Artificial Sequence
  primer
tctggtcaacgtagcgagaag

SEQ ID NO: 104563 - DNA, 20 bp, Artificial Sequence
  primer
actggaagaaggcatgaggc

SEQ ID NO: 104564 - DNA, 21 bp, Artificial Sequence
  primer
gtttcagtcccatcacagcag

SEQ ID NO: 104565 - DNA, 39 bp, Artificial Sequence
  primer
gtaaaacgacggccagttgaaacccagctttaccaagtg

SEQ ID NO: 104566 - DNA, 38 bp, Artificial Sequence
  primer
gtaaaacgacggccagtagatcccactttggcttcttg

SEQ ID NO: 104567 - DNA, 21 bp, Artificial Sequence
  primer
caagaccagctgtgacctgag

SEQ ID NO: 104568 - DNA, 21 bp, Artificial Sequence
  primer
tggcaggtgtggctatgatac

SEQ ID NO: 104569 - DNA, 38 bp, Artificial Sequence
  primer
gtaaaacgacggccagtcgtgaacaccaggttatgtgg

SEQ ID NO: 104570 - DNA, 36 bp, Artificial Sequence
  primer
gtaaaacgacggccagtggaactgtcagagcgggag

SEQ ID NO: 104571 - DNA, 22 bp, Artificial Sequence
  primer
gaaactgcagatttgcataacg

SEQ ID NO: 104572 - DNA, 37 bp, Artificial Sequence
  primer
gtaaaacgacggccagtaccggcaagtgattgtgaac

SEQ ID NO: 104573 - DNA, 26 bp, Artificial Sequence
  primer
catgactaatgtggctaataacaacc

SEQ ID NO: 104574 - DNA, 42 bp, Artificial Sequence
  primer
gtaaaacgacggccagttctggttacatggatcttgtcactt

SEQ ID NO: 104575 - DNA, 39 bp, Artificial Sequence
  primer
gtaaaacgacggccagtggaagataaacacgtttgctcg

SEQ ID NO: 104576 - DNA, 21 bp, Artificial Sequence
  primer
ttaccagtcttcccatcccac

SEQ ID NO: 104577 - DNA, 21 bp, Artificial Sequence
  primer
aatctttcccttggaatgctg

SEQ ID NO: 104578 - DNA, 38 bp, Artificial Sequence
  primer
gtaaaacgacggccagtgctgactagggctgtgaggac

SEQ ID NO: 104579 - DNA, 21 bp, Artificial Sequence
  primer
ttactgctaccacatgcgacc

SEQ ID NO: 104580 - DNA, 41 bp, Artificial Sequence
  primer
gtaaaacgacggccagtccaaactcaactaagtcttcaccc

SEQ ID NO: 104581 - DNA, 38 bp, Artificial Sequence
  primer
gtaaaacgacggccagtgagtgccaaattcttcaatgc

SEQ ID NO: 104582 - DNA, 25 bp, Artificial Sequence
  primer
tgcaatttagaggaaatcaagagtc

SEQ ID NO: 104583 - DNA, 45 bp, Artificial Sequence
  primer
gtaaaacgacggccagtagttggcttcttagaatatgtctttaca

SEQ ID NO: 104584 - DNA, 24 bp, Artificial Sequence
  primer
aatttaggatccattcagcttcag

SEQ ID NO: 104585 - DNA, 21 bp, Artificial Sequence
  primer
ttccagcacacactcttcagg

SEQ ID NO: 104586 - DNA, 20 bp, Artificial Sequence
  primer
aatggaagaaaggcccaatg

SEQ ID NO: 104587 - DNA, 21 bp, Artificial Sequence
  primer
tttgtgagttgatgccaaacc

SEQ ID NO: 104588 - DNA, 21 bp, Artificial Sequence
  primer
tagattagctgtggctttcgc

SEQ ID NO: 104589 - DNA, 36 bp, Artificial Sequence
  primer
gtaaaacgacggccagtcccatccctgcagaactgt

SEQ ID NO: 104590 - DNA, 38 bp, Artificial Sequence
  primer
gtaaaacgacggccagtaatgtttccaaagggccatac

SEQ ID NO: 104591 - DNA, 21 bp, Artificial Sequence
  primer
gcacgattgagcatttctgtc

SEQ ID NO: 104592 - DNA, 21 bp, Artificial Sequence
  primer
gctggaggaagtgtaaggctc

SEQ ID NO: 104593 - DNA, 36 bp, Artificial Sequence
  primer
gtaaaacgacggccagtgggccagtgagtcttcagg

SEQ ID NO: 104594 - DNA, 21 bp, Artificial Sequence
  primer
ctgtagatcgtgtctgggtgc

SEQ ID NO: 104595 - DNA, 21 bp, Artificial Sequence
  primer
aggcacccgtacataccctac

SEQ ID NO: 104596 - DNA, 21 bp, Artificial Sequence
  primer
atctcacgcctgggtaaactg

SEQ ID NO: 104597 - DNA, 21 bp, Artificial Sequence
  primer
gtgtggagggagggtcaatac

SEQ ID NO: 104598 - DNA, 38 bp, Artificial Sequence
  primer
gtaaaacgacggccagttgcagcttgtagaacctgtgg

SEQ ID NO: 104599 - DNA, 20 bp, Artificial Sequence
  primer
aggtcctcctggaacaggtc

SEQ ID NO: 104600 - DNA, 38 bp, Artificial Sequence
  primer
gtaaaacgacggccagtgacccacaaagattcccaatg

SEQ ID NO: 104601 - DNA, 38 bp, Artificial Sequence
  primer
gtaaaacgacggccagtattcaaggtgtgcagaaaggc

SEQ ID NO: 104602 - DNA, 38 bp, Artificial Sequence
  primer
gtaaaacgacggccagtgtcctctgctggtcctattgc

SEQ ID NO: 104603 - DNA, 21 bp, Artificial Sequence
  primer
agctttcccatttgtcatgtg

SEQ ID NO: 104604 - DNA, 20 bp, Artificial Sequence
  primer
agcctgtggtgaacaccttg

SEQ ID NO: 104605 - DNA, 38 bp, Artificial Sequence
  primer
gtaaaacgacggccagtccaggcagagaagctaggaac

SEQ ID NO: 104606 - DNA, 21 bp, Artificial Sequence
  primer
atgtagggaggctcctctgtg

SEQ ID NO: 104607 - DNA, 36 bp, Artificial Sequence
  primer
gtaaaacgacggccagtagcagcctccaatgacctg

SEQ ID NO: 104608 - DNA, 37 bp, Artificial Sequence
  primer
gtaaaacgacggccagtccctgctcaccctctgtctc

SEQ ID NO: 104609 - DNA, 20 bp, Artificial Sequence
  primer
ctcccaaacccaccactacc

SEQ ID NO: 104610 - DNA, 20 bp, Artificial Sequence
  primer
aacagtgaggaaagctgggc

SEQ ID NO: 104611 - DNA, 21 bp, Artificial Sequence
  primer
tgtggttagtaaggcgtgtgg

SEQ ID NO: 104612 - DNA, 23 bp, Artificial Sequence
  primer
tgatttaagggcttcttgaaagg

SEQ ID NO: 104613 - DNA, 21 bp, Artificial Sequence
  primer
caagtatgtatgtgggctggg

SEQ ID NO: 104614 - DNA, 36 bp, Artificial Sequence
  primer
gtaaaacgacggccagtactgaccagtaccgctgcc

SEQ ID NO: 104615 - DNA, 23 bp, Artificial Sequence
  primer
cttactcactggaagacctgctc

SEQ ID NO: 104616 - DNA, 38 bp, Artificial Sequence
  primer
gtaaaacgacggccagtacagatacaacacattgcccg

SEQ ID NO: 104617 - DNA, 42 bp, Artificial Sequence
  primer
gtaaaacgacggccagtttcttgctcagaatggtcagatatt

SEQ ID NO: 104618 - DNA, 38 bp, Artificial Sequence
  primer
gtaaaacgacggccagtcttgccttcgaaccactcttc

SEQ ID NO: 104619 - DNA, 36 bp, Artificial Sequence
  primer
gtaaaacgacggccagtctggaccacaagggctttc

SEQ ID NO: 104620 - DNA, 38 bp, Artificial Sequence
  primer
gtaaaacgacggccagtaggaccacaccaataaccagc

SEQ ID NO: 104621 - DNA, 21 bp, Artificial Sequence
  primer
acccaggctctttccactttc

SEQ ID NO: 104622 - DNA, 21 bp, Artificial Sequence
  primer
agaacaggtaccattccaccc

SEQ ID NO: 104623 - DNA, 21 bp, Artificial Sequence
  primer
attcttccctagggcatctgg

SEQ ID NO: 104624 - DNA, 38 bp, Artificial Sequence
  primer
gtaaaacgacggccagttctgaagcctctctctgtccc

SEQ ID NO: 104625 - DNA, 21 bp, Artificial Sequence
  primer
cctggcagtctacgctaaatg

SEQ ID NO: 104626 - DNA, 38 bp, Artificial Sequence
  primer
gtaaaacgacggccagttgggaagagacaaggtcaagg

SEQ ID NO: 104627 - DNA, 38 bp, Artificial Sequence
  primer
gtaaaacgacggccagtctcctcccatctgactcatcc

SEQ ID NO: 104628 - DNA, 38 bp, Artificial Sequence
  primer
gtaaaacgacggccagttcacactggctgtgagaaagg

SEQ ID NO: 104629 - DNA, 21 bp, Artificial Sequence
  primer
atgtgaccatgctacccactg

SEQ ID NO: 104630 - DNA, 22 bp, Artificial Sequence
  primer
tcttctcagcctggatctgttc

SEQ ID NO: 104631 - DNA, 21 bp, Artificial Sequence
  primer
cccactggaatctctttcagc

SEQ ID NO: 104632 - DNA, 23 bp, Artificial Sequence
  primer
caacaggcctaagagagaccaag

SEQ ID NO: 104633 - DNA, 38 bp, Artificial Sequence
  primer
gtaaaacgacggccagtttctttcctagctcccatccc

SEQ ID NO: 104634 - DNA, 21 bp, Artificial Sequence
  primer
aagcaacagtgcttcctacgg

SEQ ID NO: 104635 - DNA, 20 bp, Artificial Sequence
  primer
tgagatgcactggagaaggg

SEQ ID NO: 104636 - DNA, 21 bp, Artificial Sequence
  primer
caggctcctgactttctgagg

SEQ ID NO: 104637 - DNA, 38 bp, Artificial Sequence
  primer
gtaaaacgacggccagtttaggctggctactctccagg

SEQ ID NO: 104638 - DNA, 38 bp, Artificial Sequence
  primer
gtaaaacgacggccagttgctatggccttctgagtctg

SEQ ID NO: 104639 - DNA, 21 bp, Artificial Sequence
  primer
gtcatggtcagtggtgagcag

SEQ ID NO: 104640 - DNA, 38 bp, Artificial Sequence
  primer
gtaaaacgacggccagtggacagacaaggagaactggg

SEQ ID NO: 104641 - DNA, 20 bp, Artificial Sequence
  primer
aggcctgaagcccataattg

SEQ ID NO: 104642 - DNA, 38 bp, Artificial Sequence
  primer
gtaaaacgacggccagtgggtcactggtaagggagaag

SEQ ID NO: 104643 - DNA, 21 bp, Artificial Sequence
  primer
caaagtaccgaatgctgctgt

SEQ ID NO: 104644 - DNA, 38 bp, Artificial Sequence
  primer
gtaaaacgacggccagttccaaagcactgcattactgg

SEQ ID NO: 104645 - DNA, 21 bp, Artificial Sequence
  primer
gatcgtcctggaagaggtctg

SEQ ID NO: 104646 - DNA, 21 bp, Artificial Sequence
  primer
cagagaggccgtgtcgtatag

SEQ ID NO: 104647 - DNA, 21 bp, Artificial Sequence
  primer
gctccaagagttctggtctcc

SEQ ID NO: 104648 - DNA, 36 bp, Artificial Sequence
  primer
gtaaaacgacggccagtagagcgagtcacgggagtg

SEQ ID NO: 104649 - DNA, 21 bp, Artificial Sequence
  primer
aaagcagttccgttccaagtc

SEQ ID NO: 104650 - DNA, 21 bp, Artificial Sequence
  primer
aggtgaggatgaatttctggc

SEQ ID NO: 104651 - DNA, 21 bp, Artificial Sequence
  primer
agtgtgggaccaggaattcag

SEQ ID NO: 104652 - DNA, 21 bp, Artificial Sequence
  primer
catgccaacaaagaaacggag

SEQ ID NO: 104653 - DNA, 38 bp, Artificial Sequence
  primer
gtaaaacgacggccagtcctcctaaacaacaagcctgg

SEQ ID NO: 104654 - DNA, 38 bp, Artificial Sequence
  primer
gtaaaacgacggccagtctccacctgctagaaccactg

SEQ ID NO: 104655 - DNA, 21 bp, Artificial Sequence
  primer
atatggacaggcctggaactg

SEQ ID NO: 104656 - DNA, 36 bp, Artificial Sequence
  primer
gtaaaacgacggccagtcaggtgtctgttgcaaggc

SEQ ID NO: 104657 - DNA, 21 bp, Artificial Sequence
  primer
caggaaggccagtgttctagg

SEQ ID NO: 104658 - DNA, 21 bp, Artificial Sequence
  primer
cacactgggtcactgttgagg

SEQ ID NO: 104659 - DNA, 21 bp, Artificial Sequence
  primer
gacaagcaggcagctagtgag

SEQ ID NO: 104660 - DNA, 38 bp, Artificial Sequence
  primer
gtaaaacgacggccagtcagactgagttggcacacagc

SEQ ID NO: 104661 - DNA, 36 bp, Artificial Sequence
  primer
gtaaaacgacggccagttcagccggtgaacactcag

SEQ ID NO: 104662 - DNA, 37 bp, Artificial Sequence
  primer
gtaaaacgacggccagtgtacacaggaggatgacggg

SEQ ID NO: 104663 - DNA, 21 bp, Artificial Sequence
  primer
ctccctgtgttgtgtgggtag

SEQ ID NO: 104664 - DNA, 20 bp, Artificial Sequence
  primer
agctgcagaggacagacagg

SEQ ID NO: 104665 - DNA, 21 bp, Artificial Sequence
  primer
tgcgaacagtgaggtcatagg

SEQ ID NO: 104666 - DNA, 18 bp, Artificial Sequence
  primer
gccactcctcactgctgg

SEQ ID NO: 104667 - DNA, 21 bp, Artificial Sequence
  primer
tgagatacatcgcgtgacacc

SEQ ID NO: 104668 - DNA, 38 bp, Artificial Sequence
  primer
gtaaaacgacggccagttccaatcatctacccacccac

SEQ ID NO: 104669 - DNA, 21 bp, Artificial Sequence
  primer
gctcgtacaggaatacacggg

SEQ ID NO: 104670 - DNA, 38 bp, Artificial Sequence
  primer
gtaaaacgacggccagtacccacaggctcctgtacttg

SEQ ID NO: 104671 - DNA, 21 bp, Artificial Sequence
  primer
gaagtttggaagctgggtcag

SEQ ID NO: 104672 - DNA, 21 bp, Artificial Sequence
  primer
aggaatggaacttcaacctgg

SEQ ID NO: 104673 - DNA, 36 bp, Artificial Sequence
  primer
gtaaaacgacggccagttgacatgtggctgctgtcc

SEQ ID NO: 104674 - DNA, 38 bp, Artificial Sequence
  primer
gtaaaacgacggccagtcactaggaagtggcagcacag

SEQ ID NO: 104675 - DNA, 21 bp, Artificial Sequence
  primer
tcttccagcttgaggatgagc

SEQ ID NO: 104676 - DNA, 21 bp, Artificial Sequence
  primer
gtccaagctgtgaagtgcaac

SEQ ID NO: 104677 - DNA, 19 bp, Artificial Sequence
  primer
cctagaaccgcttcctccc

SEQ ID NO: 104678 - DNA, 38 bp, Artificial Sequence
  primer
gtaaaacgacggccagtccacatctcacagccaagaag

SEQ ID NO: 104679 - DNA, 38 bp, Artificial Sequence
  primer
gtaaaacgacggccagtattgaaggaggcgtcatgttc

SEQ ID NO: 104680 - DNA, 21 bp, Artificial Sequence
  primer
tggcttcaagtgattgattgg

SEQ ID NO: 104681 - DNA, 21 bp, Artificial Sequence
  primer
ttgggaaggaggagaggaaag

SEQ ID NO: 104682 - DNA, 19 bp, Artificial Sequence
  primer
atctaacagacgcgctggc

SEQ ID NO: 104683 - DNA, 38 bp, Artificial Sequence
  primer
gtaaaacgacggccagttcacttctgttgcttcggatg

SEQ ID NO: 104684 - DNA, 23 bp, Artificial Sequence
  primer
tcacagctaagctacagacccag

SEQ ID NO: 104685 - DNA, 38 bp, Artificial Sequence
  primer
gtaaaacgacggccagtctggtgggctagtagctgagg

SEQ ID NO: 104686 - DNA, 21 bp, Artificial Sequence
  primer
ggatatacacccagcatgtcc

SEQ ID NO: 104687 - DNA, 21 bp, Artificial Sequence
  primer
ggcgacacaaacctcatttac

SEQ ID NO: 104688 - DNA, 21 bp, Artificial Sequence
  primer
ggatatacacccagcatgtcc

SEQ ID NO: 104689 - DNA, 39 bp, Artificial Sequence
  primer
gtaaaacgacggccagtcaaacatctatgaagcccttgg

SEQ ID NO: 104690 - DNA, 21 bp, Artificial Sequence
  primer
gtttccacctctgaaggcaag

SEQ ID NO: 104691 - DNA, 44 bp, Artificial Sequence
  primer
gtaaaacgacggccagttgcttagaatccattagtaggaaactc

SEQ ID NO: 104692 - DNA, 38 bp, Artificial Sequence
  primer
gtaaaacgacggccagtaagggagccttgagccttaac

SEQ ID NO: 104693 - DNA, 21 bp, Artificial Sequence
  primer
tattgtgaccatgggagcttg

SEQ ID NO: 104694 - DNA, 38 bp, Artificial Sequence
  primer
gtaaaacgacggccagttgatggccataccttactggg

SEQ ID NO: 104695 - DNA, 40 bp, Artificial Sequence
  primer
gtaaaacgacggccagttgatattcaatttgattgcaggg

SEQ ID NO: 104696 - DNA, 21 bp, Artificial Sequence
  primer
ctagggcataacttccagggc

SEQ ID NO: 104697 - DNA, 38 bp, Artificial Sequence
  primer
gtaaaacgacggccagtcatgcttcataaatgcttggc

SEQ ID NO: 104698 - DNA, 21 bp, Artificial Sequence
  primer
agggaaacttcctgaaagcag

SEQ ID NO: 104699 - DNA, 38 bp, Artificial Sequence
  primer
gtaaaacgacggccagttttagggcctgtagttcgagg

SEQ ID NO: 104700 - DNA, 38 bp, Artificial Sequence
  primer
gtaaaacgacggccagttgtgtggaccactaaagccac

SEQ ID NO: 104701 - DNA, 38 bp, Artificial Sequence
  primer
gtaaaacgacggccagtcaggtcgaaatatgccacaag

SEQ ID NO: 104702 - DNA, 41 bp, Artificial Sequence
  primer
gtaaaacgacggccagtgacctgcagttccaaattattctt

SEQ ID NO: 104703 - DNA, 21 bp, Artificial Sequence
  primer
ggttatgaaacccacaggctc

SEQ ID NO: 104704 - DNA, 38 bp, Artificial Sequence
  primer
gtaaaacgacggccagttttatttccacttcgcagctc

SEQ ID NO: 104705 - DNA, 22 bp, Artificial Sequence
  primer
tctctttactctgcgtccacaa

SEQ ID NO: 104706 - DNA, 21 bp, Artificial Sequence
  primer
gaattaccacaacatgctcgc

SEQ ID NO: 104707 - DNA, 38 bp, Artificial Sequence
  primer
gtaaaacgacggccagttcggaaacctcttccacctac

SEQ ID NO: 104708 - DNA, 26 bp, Artificial Sequence
  primer
cctctgacagtttaagtgatgaaaga

SEQ ID NO: 104709 - DNA, 44 bp, Artificial Sequence
  primer
gtaaaacgacggccagtaatagcttgatgtttagaagaaattcg

SEQ ID NO: 104710 - DNA, 27 bp, Artificial Sequence
  primer
gctgaacttgttctctcaagtttaagt

SEQ ID NO: 104711 - DNA, 38 bp, Artificial Sequence
  primer
gtaaaacgacggccagtgaacctatgcgttgtgagtgc

SEQ ID NO: 104712 - DNA, 18 bp, Artificial Sequence
  primer
cctggccaacagagcaag

SEQ ID NO: 104713 - DNA, 21 bp, Artificial Sequence
  primer
caggatgactttggatttggg

SEQ ID NO: 104714 - DNA, 20 bp, Artificial Sequence
  primer
atggtatgaacctgggaggc

SEQ ID NO: 104715 - DNA, 39 bp, Artificial Sequence
  primer
gtaaaacgacggccagttttcaatttgtttcacctttgc

SEQ ID NO: 104716 - DNA, 38 bp, Artificial Sequence
  primer
gtaaaacgacggccagtggaacaggaaacagggtgaag

SEQ ID NO: 104717 - DNA, 21 bp, Artificial Sequence
  primer
gtgttgccatcagtgcttcac

SEQ ID NO: 104718 - DNA, 21 bp, Artificial Sequence
  primer
cttgaattcctggctcaagtg

SEQ ID NO: 104719 - DNA, 21 bp, Artificial Sequence
  primer
ataaggccaggtttcttcagc

SEQ ID NO: 104720 - DNA, 21 bp, Artificial Sequence
  primer
tgaccatttggaaaccacttg

SEQ ID NO: 104721 - DNA, 19 bp, Artificial Sequence
  primer
ggaaggaagagggcagagg

SEQ ID NO: 104722 - DNA, 39 bp, Artificial Sequence
  primer
gtaaaacgacggccagtcctttcagagagaatgtagccc

SEQ ID NO: 104723 - DNA, 18 bp, Artificial Sequence
  primer
aaggagtcggtgtcgctg

SEQ ID NO: 104724 - DNA, 21 bp, Artificial Sequence
  primer
aaacacaagctgaatcccagg

SEQ ID NO: 104725 - DNA, 21 bp, Artificial Sequence
  primer
gcccatttctaaggacaccac

SEQ ID NO: 104726 - DNA, 38 bp, Artificial Sequence
  primer
gtaaaacgacggccagtccctaaagaccctcaagagcc

SEQ ID NO: 104727 - DNA, 21 bp, Artificial Sequence
  primer
taggcccagaagtgagcagag

SEQ ID NO: 104728 - DNA, 21 bp, Artificial Sequence
  primer
tcagttctccaggtcaccaag

SEQ ID NO: 104729 - DNA, 21 bp, Artificial Sequence
  primer
tgtttggcataacaggtttcc

SEQ ID NO: 104730 - DNA, 21 bp, Artificial Sequence
  primer
cctggagaaacttgaccttgg

SEQ ID NO: 104731 - DNA, 21 bp, Artificial Sequence
  primer
gaaacgaacaaaggcatgaac

SEQ ID NO: 104732 - DNA, 21 bp, Artificial Sequence
  primer
taagaaactgtctggtggccg

SEQ ID NO: 104733 - DNA, 20 bp, Artificial Sequence
  primer
gaagtggtggtgagaggcag

SEQ ID NO: 104734 - DNA, 38 bp, Artificial Sequence
  primer
gtaaaacgacggccagtcagtaaccagggtagggcaag

SEQ ID NO: 104735 - DNA, 40 bp, Artificial Sequence
  primer
gtaaaacgacggccagttgctctcaataaaggagcagaag

SEQ ID NO: 104736 - DNA, 21 bp, Artificial Sequence
  primer
aaatgctgccaaagtagcctc

SEQ ID NO: 104737 - DNA, 38 bp, Artificial Sequence
  primer
gtaaaacgacggccagttgaaatgtcatccacccacac

SEQ ID NO: 104738 - DNA, 21 bp, Artificial Sequence
  primer
agcagcggtccagaattacag

SEQ ID NO: 104739 - DNA, 21 bp, Artificial Sequence
  primer
gccaaataagccctaccttcc

SEQ ID NO: 104740 - DNA, 22 bp, Artificial Sequence
  primer
ggcataatgaggcttgagagtg

SEQ ID NO: 104741 - DNA, 38 bp, Artificial Sequence
  primer
gtaaaacgacggccagtctatgggagaaggagccaatg

SEQ ID NO: 104742 - DNA, 38 bp, Artificial Sequence
  primer
gtaaaacgacggccagtgcgacgaagaaggtgagagtc

SEQ ID NO: 104743 - DNA, 21 bp, Artificial Sequence
  primer
gacgtaatcccaagtgtcagc

SEQ ID NO: 104744 - DNA, 38 bp, Artificial Sequence
  primer
gtaaaacgacggccagttggtccatgtgcagagtaacg

SEQ ID NO: 104745 - DNA, 38 bp, Artificial Sequence
  primer
gtaaaacgacggccagtcccgagtggagataggagttg

SEQ ID NO: 104746 - DNA, 37 bp, Artificial Sequence
  primer
gtaaaacgacggccagtaacagagtgtggttgccgtc

SEQ ID NO: 104747 - DNA, 37 bp, Artificial Sequence
  primer
gtaaaacgacggccagtctcgagcacctccgtatcag

SEQ ID NO: 104748 - DNA, 21 bp, Artificial Sequence
  primer
gggccttccagagtaaggatg

SEQ ID NO: 104749 - DNA, 38 bp, Artificial Sequence
  primer
gtaaaacgacggccagtggaggtaattctaggcgggag

SEQ ID NO: 104750 - DNA, 20 bp, Artificial Sequence
  primer
actgattccagcccagcttc

SEQ ID NO: 104751 - DNA, 35 bp, Artificial Sequence
  primer
gtaaaacgacggccagtgtctccgcgggacttagg

SEQ ID NO: 104752 - DNA, 19 bp, Artificial Sequence
  primer
ctctccacctgggaagcag

SEQ ID NO: 104753 - DNA, 21 bp, Artificial Sequence
  primer
attcgtggcttagacactggg

SEQ ID NO: 104754 - DNA, 21 bp, Artificial Sequence
  primer
gagcaaatttaaggcacccag

SEQ ID NO: 104755 - DNA, 21 bp, Artificial Sequence
  primer
gggacagtcacctgtatttgc

SEQ ID NO: 104756 - DNA, 21 bp, Artificial Sequence
  primer
ttgtctccgaagagtggattg

SEQ ID NO: 104757 - DNA, 20 bp, Artificial Sequence
  primer
cattgtcctcctggatgtgg

SEQ ID NO: 104758 - DNA, 38 bp, Artificial Sequence
  primer
gtaaaacgacggccagtcaacccagatcctggtcagtc

SEQ ID NO: 104759 - DNA, 21 bp, Artificial Sequence
  primer
gtatccctggtccagcatgag

SEQ ID NO: 104760 - DNA, 21 bp, Artificial Sequence
  primer
aacccacgagtctctggtcac

SEQ ID NO: 104761 - DNA, 20 bp, Artificial Sequence
  primer
tctgctccaccaggtctttc

SEQ ID NO: 104762 - DNA, 39 bp, Artificial Sequence
  primer
gtaaaacgacggccagttcaaattctggagacaaactgc

SEQ ID NO: 104763 - DNA, 42 bp, Artificial Sequence
  primer
gtaaaacgacggccagtccaaagaagagctcggttatttatc

SEQ ID NO: 104764 - DNA, 21 bp, Artificial Sequence
  primer
gaacagagacgaactcgaccg

SEQ ID NO: 104765 - DNA, 21 bp, Artificial Sequence
  primer
tgaggaaattaaccaccctcc

SEQ ID NO: 104766 - DNA, 22 bp, Artificial Sequence
  primer
caatggctttaactgtcgaatg

SEQ ID NO: 104767 - DNA, 21 bp, Artificial Sequence
  primer
agaagatggatgaatgctggg

SEQ ID NO: 104768 - DNA, 20 bp, Artificial Sequence
  primer
ctattgtatggctcccaggc

SEQ ID NO: 104769 - DNA, 38 bp, Artificial Sequence
  primer
gtaaaacgacggccagtgcctggtttctggctatcatc

SEQ ID NO: 104770 - DNA, 38 bp, Artificial Sequence
  primer
gtaaaacgacggccagtgtgtgtgtgttctgggtgatg

SEQ ID NO: 104771 - DNA, 37 bp, Artificial Sequence
  primer
gtaaaacgacggccagtccacctgaggtcagctaggc

SEQ ID NO: 104772 - DNA, 39 bp, Artificial Sequence
  primer
gtaaaacgacggccagtgccacaaatgcagtaacatgac

SEQ ID NO: 104773 - DNA, 20 bp, Artificial Sequence
  primer
agggtaacaacgaaggaggc

SEQ ID NO: 104774 - DNA, 39 bp, Artificial Sequence
  primer
gtaaaacgacggccagtggttgcatcaactcaactaggc

SEQ ID NO: 104775 - DNA, 21 bp, Artificial Sequence
  primer
caagtgtcttgggtttcaagc

SEQ ID NO: 104776 - DNA, 42 bp, Artificial Sequence
  primer
gtaaaacgacggccagttgtcttatccaggagagaagtccac

SEQ ID NO: 104777 - DNA, 22 bp, Artificial Sequence
  primer
ctgctcaatctcagcacagaag

SEQ ID NO: 104778 - DNA, 21 bp, Artificial Sequence
  primer
ttgcacatccaatatgctttg

SEQ ID NO: 104779 - DNA, 42 bp, Artificial Sequence
  primer
gtaaaacgacggccagtgccagttcaaagctcagattatttc

SEQ ID NO: 104780 - DNA, 27 bp, Artificial Sequence
  primer
caagctcagactcttacatcaaatacc

SEQ ID NO: 104781 - DNA, 23 bp, Artificial Sequence
  primer
tcttccacacgcctacttaacac

SEQ ID NO: 104782 - DNA, 37 bp, Artificial Sequence
  primer
gtaaaacgacggccagtgtttccttgggagttcctgc

SEQ ID NO: 104783 - DNA, 21 bp, Artificial Sequence
  primer
aaggtgtgataattgtgggca

SEQ ID NO: 104784 - DNA, 21 bp, Artificial Sequence
  primer
ggctgctgatatagggaccac

SEQ ID NO: 104785 - DNA, 21 bp, Artificial Sequence
  primer
cccaacacattctgctacagg

SEQ ID NO: 104786 - DNA, 22 bp, Artificial Sequence
  primer
gaaattgagagaagcggaaatg

SEQ ID NO: 104787 - DNA, 38 bp, Artificial Sequence
  primer
gtaaaacgacggccagtcccatagacatgaattgacgg

SEQ ID NO: 104788 - DNA, 21 bp, Artificial Sequence
  primer
ccctcttcacaactacctccc

SEQ ID NO: 104789 - DNA, 39 bp, Artificial Sequence
  primer
gtaaaacgacggccagtcttcccaaatatcttgaaaggc

SEQ ID NO: 104790 - DNA, 23 bp, Artificial Sequence
  primer
catacaaagtgaggcagaagtgg

SEQ ID NO: 104791 - DNA, 21 bp, Artificial Sequence
  primer
gaagcaccggctgtactcttt

SEQ ID NO: 104792 - DNA, 21 bp, Artificial Sequence
  primer
agaaatcagggcagcagattc

SEQ ID NO: 104793 - DNA, 24 bp, Artificial Sequence
  primer
ccctaacagcggtgatatcattag

SEQ ID NO: 104794 - DNA, 40 bp, Artificial Sequence
  primer
gtaaaacgacggccagtgagggcatctcttcaaatgttta

SEQ ID NO: 104795 - DNA, 26 bp, Artificial Sequence
  primer
gaagcttctcaaacgtaacagtaaag

SEQ ID NO: 104796 - DNA, 21 bp, Artificial Sequence
  primer
gggttgctgaagaggtctttg

SEQ ID NO: 104797 - DNA, 21 bp, Artificial Sequence
  primer
aaactggcatactcatgctgc

SEQ ID NO: 104798 - DNA, 22 bp, Artificial Sequence
  primer
gactctagaacagtgggatggc

SEQ ID NO: 104799 - DNA, 20 bp, Artificial Sequence
  primer
tttgcccacataaaccttgc

SEQ ID NO: 104800 - DNA, 38 bp, Artificial Sequence
  primer
gtaaaacgacggccagtctgactgctggcatatggttc

SEQ ID NO: 104801 - DNA, 38 bp, Artificial Sequence
  primer
gtaaaacgacggccagtttgttaacgaagccagatccc

SEQ ID NO: 104802 - DNA, 21 bp, Artificial Sequence
  primer
gggtgatagagccagaccttg

SEQ ID NO: 104803 - DNA, 23 bp, Artificial Sequence
  primer
tgcagaatgtgtactttagcacc

SEQ ID NO: 104804 - DNA, 21 bp, Artificial Sequence
  primer
aagagggttggacatggaatc

SEQ ID NO: 104805 - DNA, 26 bp, Artificial Sequence
  primer
agcttatctgtctgcataagtctacg

SEQ ID NO: 104806 - DNA, 21 bp, Artificial Sequence
  primer
gacttcccgcaacaaacaatc

SEQ ID NO: 104807 - DNA, 20 bp, Artificial Sequence
  primer
agctcgcaactaggcacaag

SEQ ID NO: 104808 - DNA, 39 bp, Artificial Sequence
  primer
gtaaaacgacggccagttcagaagaagggtgctgaagtc

SEQ ID NO: 104809 - DNA, 39 bp, Artificial Sequence
  primer
gtaaaacgacggccagtggatttctatcagctcaactgc

SEQ ID NO: 104810 - DNA, 20 bp, Artificial Sequence
  primer
caggtgatccatccgtcttg

SEQ ID NO: 104811 - DNA, 22 bp, Artificial Sequence
  primer
acacaacagtacaccaagaggg

SEQ ID NO: 104812 - DNA, 21 bp, Artificial Sequence
  primer
ctgtgtaaacggagtccaggg

SEQ ID NO: 104813 - DNA, 21 bp, Artificial Sequence
  primer
ctggctgtgttgccatgtatc

SEQ ID NO: 104814 - DNA, 21 bp, Artificial Sequence
  primer
gtctccttgttgggtggagac

SEQ ID NO: 104815 - DNA, 20 bp, Artificial Sequence
  primer
ccacatggaaacagagcagg

SEQ ID NO: 104816 - DNA, 21 bp, Artificial Sequence
  primer
ttccctggtaccatgatttcc

SEQ ID NO: 104817 - DNA, 38 bp, Artificial Sequence
  primer
gtaaaacgacggccagtctctgtggtcactgcttctgg

SEQ ID NO: 104818 - DNA, 39 bp, Artificial Sequence
  primer
gtaaaacgacggccagtgctaggagcacaggtctgattg

SEQ ID NO: 104819 - DNA, 37 bp, Artificial Sequence
  primer
gtaaaacgacggccagtggagcaagagcagtggtgag

SEQ ID NO: 104820 - DNA, 38 bp, Artificial Sequence
  primer
gtaaaacgacggccagttgtctgtgccttaagcaggtc

SEQ ID NO: 104821 - DNA, 20 bp, Artificial Sequence
  primer
agggatactccctcggtcag

SEQ ID NO: 104822 - DNA, 21 bp, Artificial Sequence
  primer
gcttgaagaggcagacactcc

SEQ ID NO: 104823 - DNA, 23 bp, Artificial Sequence
  primer
catccctacagtctgatcactgg

SEQ ID NO: 104824 - DNA, 21 bp, Artificial Sequence
  primer
tagttgggactagagcccagg

SEQ ID NO: 104825 - DNA, 21 bp, Artificial Sequence
  primer
actgctggaaggtcctagtgg

SEQ ID NO: 104826 - DNA, 21 bp, Artificial Sequence
  primer
tcaccacgtggaagtatgagc

SEQ ID NO: 104827 - DNA, 21 bp, Artificial Sequence
  primer
ctgtagcacaagctgggactg

SEQ ID NO: 104828 - DNA, 20 bp, Artificial Sequence
  primer
agcccgtgtgacaagagaag

SEQ ID NO: 104829 - DNA, 38 bp, Artificial Sequence
  primer
gtaaaacgacggccagtcatttccgggtgactactgag

SEQ ID NO: 104830 - DNA, 38 bp, Artificial Sequence
  primer
gtaaaacgacggccagtaatggcttaaatcctggatgg

SEQ ID NO: 104831 - DNA, 22 bp, Artificial Sequence
  primer
ggcatgactttatgcctgaaac

SEQ ID NO: 104832 - DNA, 21 bp, Artificial Sequence
  primer
gattcactgagggaaattggg

SEQ ID NO: 104833 - DNA, 38 bp, Artificial Sequence
  primer
gtaaaacgacggccagtggcagcagaaactggagaaac

SEQ ID NO: 104834 - DNA, 21 bp, Artificial Sequence
  primer
ggaacaccttctccctttgtg

SEQ ID NO: 104835 - DNA, 38 bp, Artificial Sequence
  primer
gtaaaacgacggccagttccagatagctcctgctttcc

SEQ ID NO: 104836 - DNA, 21 bp, Artificial Sequence
  primer
agaaagagctttcgttctggg

SEQ ID NO: 104837 - DNA, 22 bp, Artificial Sequence
  primer
tttcagtccaagccacaatctt

SEQ ID NO: 104838 - DNA, 39 bp, Artificial Sequence
  primer
gtaaaacgacggccagtcagacactttcttggttccacc

SEQ ID NO: 104839 - DNA, 38 bp, Artificial Sequence
  primer
gtaaaacgacggccagttggaaagatgtcgccacttag

SEQ ID NO: 104840 - DNA, 41 bp, Artificial Sequence
  primer
gtaaaacgacggccagtccctaagctgaatgcataacattg

SEQ ID NO: 104841 - DNA, 39 bp, Artificial Sequence
  primer
gtaaaacgacggccagtgcaagacatccctcaatggtag

SEQ ID NO: 104842 - DNA, 27 bp, Artificial Sequence
  primer
caacatacccaagttaatgaagaacag

SEQ ID NO: 104843 - DNA, 22 bp, Artificial Sequence
  primer
agcaattccagatgctctaacc

SEQ ID NO: 104844 - DNA, 39 bp, Artificial Sequence
  primer
gtaaaacgacggccagttgaaatagaagctgcatttggg

SEQ ID NO: 104845 - DNA, 21 bp, Artificial Sequence
  primer
tggacttgtccaggatgacac

SEQ ID NO: 104846 - DNA, 38 bp, Artificial Sequence
  primer
gtaaaacgacggccagtataaatggcaagtggactccc

SEQ ID NO: 104847 - DNA, 21 bp, Artificial Sequence
  primer
cagaacttgcaaatcactccg

SEQ ID NO: 104848 - DNA, 38 bp, Artificial Sequence
  primer
gtaaaacgacggccagtgttgagggaggaaatagccag

SEQ ID NO: 104849 - DNA, 21 bp, Artificial Sequence
  primer
tacaatgtgtcctgacctcgc

SEQ ID NO: 104850 - DNA, 38 bp, Artificial Sequence
  primer
gtaaaacgacggccagtgtagagaaccctcccacctcg

SEQ ID NO: 104851 - DNA, 23 bp, Artificial Sequence
  primer
tccaagatcagacaattagtggc

SEQ ID NO: 104852 - DNA, 21 bp, Artificial Sequence
  primer
caacggaaccaaagtggaaac

SEQ ID NO: 104853 - DNA, 38 bp, Artificial Sequence
  primer
gtaaaacgacggccagttggaccctccctataaagctg

SEQ ID NO: 104854 - DNA, 38 bp, Artificial Sequence
  primer
gtaaaacgacggccagtaacttacagccctcctcccac

SEQ ID NO: 104855 - DNA, 38 bp, Artificial Sequence
  primer
gtaaaacgacggccagtagctcctttaacaatggcctc

SEQ ID NO: 104856 - DNA, 21 bp, Artificial Sequence
  primer
gaacccacatcctgactctcc

SEQ ID NO: 104857 - DNA, 22 bp, Artificial Sequence
  primer
gcaggacaaggagctaaatgtg

SEQ ID NO: 104858 - DNA, 38 bp, Artificial Sequence
  primer
gtaaaacgacggccagtgaacatctcctccatgttggg

SEQ ID NO: 104859 - DNA, 22 bp, Artificial Sequence
  primer
tcacagtttcccataaaccctg

SEQ ID NO: 104860 - DNA, 38 bp, Artificial Sequence
  primer
gtaaaacgacggccagtaaagtttatgggtcacctggg

SEQ ID NO: 104861 - DNA, 21 bp, Artificial Sequence
  primer
actgttgaactgaaggtgccc

SEQ ID NO: 104862 - DNA, 21 bp, Artificial Sequence
  primer
tctgcaaagaggctctgaagg

SEQ ID NO: 104863 - DNA, 21 bp, Artificial Sequence
  primer
tgaggtatgtgcttgcctgtc

SEQ ID NO: 104864 - DNA, 38 bp, Artificial Sequence
  primer
gtaaaacgacggccagtagccctctgggagtatgacag

SEQ ID NO: 104865 - DNA, 38 bp, Artificial Sequence
  primer
gtaaaacgacggccagtcttctatccagtgtgggaggc

SEQ ID NO: 104866 - DNA, 21 bp, Artificial Sequence
  primer
gggatgcataacttgggtttc

SEQ ID NO: 104867 - DNA, 38 bp, Artificial Sequence
  primer
gtaaaacgacggccagtaagtgaggcacactctggagc

SEQ ID NO: 104868 - DNA, 21 bp, Artificial Sequence
  primer
tcaactccagtcagcaaatcc

SEQ ID NO: 104869 - DNA, 36 bp, Artificial Sequence
  primer
gtaaaacgacggccagtcacatcgttgctcccatcc

SEQ ID NO: 104870 - DNA, 38 bp, Artificial Sequence
  primer
gtaaaacgacggccagtagaagagataaggtgcctggg

SEQ ID NO: 104871 - DNA, 40 bp, Artificial Sequence
  primer
gtaaaacgacggccagtccaactcacaaatacttcgcatc

SEQ ID NO: 104872 - DNA, 21 bp, Artificial Sequence
  primer
tcataaacatgaaagcagccc

SEQ ID NO: 104873 - DNA, 38 bp, Artificial Sequence
  primer
gtaaaacgacggccagtttcctgtcctggaagtttgtg

SEQ ID NO: 104874 - DNA, 25 bp, Artificial Sequence
  primer
cgtatctgtacctttctctaccagg

SEQ ID NO: 104875 - DNA, 25 bp, Artificial Sequence
  primer
tctcagcttctagcttctttacctg

SEQ ID NO: 104876 - DNA, 23 bp, Artificial Sequence
  primer
gggtacagtgatttctgtcaagc

SEQ ID NO: 104877 - DNA, 38 bp, Artificial Sequence
  primer
gtaaaacgacggccagtctctaagcagctgcccttctc

SEQ ID NO: 104878 - DNA, 38 bp, Artificial Sequence
  primer
gtaaaacgacggccagtgaatgcaacctgtcttccctc

SEQ ID NO: 104879 - DNA, 35 bp, Artificial Sequence; identical to SEQ ID NO: 14576
  primer

SEQ ID NO: 104880 - DNA, 21 bp, Artificial Sequence
  primer
acaggcctcagatttggagag

SEQ ID NO: 104881 - DNA, 38 bp, Artificial Sequence
  primer
gtaaaacgacggccagttcaaaggcattccttgttgag

SEQ ID NO: 104882 - DNA, 22 bp, Artificial Sequence
  primer
aaggaaacggacagacacacac

SEQ ID NO: 104883 - DNA, 37 bp, Artificial Sequence
  primer
gtaaaacgacggccagtagagggtccaaatccacagg

SEQ ID NO: 104884 - DNA, 35 bp, Artificial Sequence
  primer
gtaaaacgacggccagtaagtgatccgcccacctg

SEQ ID NO: 104885 - DNA, 21 bp, Artificial Sequence
  primer
caggaagggagatgcactagg

SEQ ID NO: 104886 - DNA, 21 bp, Artificial Sequence
  primer
gggcaacatagtgagatcctg

SEQ ID NO: 104887 - DNA, 21 bp, Artificial Sequence
  primer
tgcagagctagtggctagtgg

SEQ ID NO: 104888 - DNA, 20 bp, Artificial Sequence
  primer
gatggctgtgttgtccatcc

SEQ ID NO: 104889 - DNA, 35 bp, Artificial Sequence
  primer
gtaaaacgacggccagtacagcacctggctcatgc

SEQ ID NO: 104890 - DNA, 37 bp, Artificial Sequence
  primer
gtaaaacgacggccagtcaggagcacccatctcagtc

SEQ ID NO: 104891 - DNA, 38 bp, Artificial Sequence
  primer
gtaaaacgacggccagtttccttacatcatgctgcgac

SEQ ID NO: 104892 - DNA, 21 bp, Artificial Sequence
  primer
ggaatgagagatgggaaaggg

SEQ ID NO: 104893 - DNA, 21 bp, Artificial Sequence
  primer
ccaacccatttctgaatctcc

SEQ ID NO: 104894 - DNA, 21 bp, Artificial Sequence
  primer
caggaaggacaaagacaagcc

SEQ ID NO: 104895 - DNA, 37 bp, Artificial Sequence
  primer
gtaaaacgacggccagtgtatcaggcctgcccatctc

SEQ ID NO: 104896 - DNA, 38 bp, Artificial Sequence
  primer
gtaaaacgacggccagtccctgcctaccttatagcacc

SEQ ID NO: 104897 - DNA, 38 bp, Artificial Sequence
  primer
gtaaaacgacggccagtagtcctgaccttacctgctgc

SEQ ID NO: 104898 - DNA, 21 bp, Artificial Sequence
  primer
caaggaagtacccgaaagtcc

SEQ ID NO: 104899 - DNA, 22 bp, Artificial Sequence
  primer
gggacatcgttcttcctaaacc

SEQ ID NO: 104900 - DNA, 36 bp, Artificial Sequence
  primer
gtaaaacgacggccagtaaagcctggcaccaaacag

SEQ ID NO: 104901 - DNA, 20 bp, Artificial Sequence
  primer
gtgagtgggtgtatgggtgg

SEQ ID NO: 104902 - DNA, 21 bp, Artificial Sequence
  primer
gctcctgctgacagtgacaag

SEQ ID NO: 104903 - DNA, 38 bp, Artificial Sequence
  primer
gtaaaacgacggccagtttacgatcaccagctctgcac

SEQ ID NO: 104904 - DNA, 21 bp, Artificial Sequence
  primer
agtaggaacaggcaggtcagg

SEQ ID NO: 104905 - DNA, 37 bp, Artificial Sequence
  primer
gtaaaacgacggccagtggcagggaggaagaaatcac

SEQ ID NO: 104906 - DNA, 40 bp, Artificial Sequence
  primer
gtaaaacgacggccagtgtagctgggactacatgactcgt

SEQ ID NO: 104907 - DNA, 38 bp, Artificial Sequence
  primer
gtaaaacgacggccagttgtaggtcagaagggcgtagg

SEQ ID NO: 104908 - DNA, 20 bp, Artificial Sequence
  primer
actggacccagtgcagacac

SEQ ID NO: 104909 - DNA, 21 bp, Artificial Sequence
  primer
agacagaagtcaccgtgaggc

SEQ ID NO: 104910 - DNA, 38 bp, Artificial Sequence
  primer
gtaaaacgacggccagtctgagttcagaaccctctggg

SEQ ID NO: 104911 - DNA, 35 bp, Artificial Sequence
  primer
gtaaaacgacggccagtccaggaggccatcctctc

SEQ ID NO: 104912 - DNA, 38 bp, Artificial Sequence
  primer
gtaaaacgacggccagtgggaatttgagccaagatcag

SEQ ID NO: 104913 - DNA, 38 bp, Artificial Sequence
  primer
gtaaaacgacggccagtaagatacttgcagggagccac

SEQ ID NO: 104914 - DNA, 21 bp, Artificial Sequence
  primer
ctgtgggtgctgacgttgtag

SEQ ID NO: 104915 - DNA, 37 bp, Artificial Sequence
  primer
gtaaaacgacggccagtcccttccgcacttaccactc

SEQ ID NO: 104916 - DNA, 36 bp, Artificial Sequence
  primer
gtaaaacgacggccagtgctgctctggaaggaaggg

SEQ ID NO: 104917 - DNA, 21 bp, Artificial Sequence
  primer
aactctgagcctctgaccctg

SEQ ID NO: 104918 - DNA, 20 bp, Artificial Sequence
  primer
aagctgggtgtgtgggtatg

SEQ ID NO: 104919 - DNA, 21 bp, Artificial Sequence
  primer
tcaacgttaacacggaacacc

SEQ ID NO: 104920 - DNA, 21 bp, Artificial Sequence
  primer
tttccattgtcggaatcacag

SEQ ID NO: 104921 - DNA, 40 bp, Artificial Sequence
  primer
gtaaaacgacggccagtcccagagttattcaaaggctcag

SEQ ID NO: 104922 - DNA, 38 bp, Artificial Sequence
  primer
gtaaaacgacggccagttcagtggcgacttgttgagtc

SEQ ID NO: 104923 - DNA, 21 bp, Artificial Sequence
  primer
tttgggataagcgtgtctgtg

SEQ ID NO: 104924 - DNA, 22 bp, Artificial Sequence
  primer
aaaggtctgttggtggaagttg

SEQ ID NO: 104925 - DNA, 20 bp, Artificial Sequence
  primer
cagtatgggtggagcgagtc

SEQ ID NO: 104926 - DNA, 20 bp, Artificial Sequence
  primer
atctagcacagctgggaacg

SEQ ID NO: 104927 - DNA, 23 bp, Artificial Sequence
  primer
aaagggacttccagaaagtgttc

SEQ ID NO: 104928 - DNA, 21 bp, Artificial Sequence
  primer
ctatgttgtccaggctttccc

SEQ ID NO: 104929 - DNA, 37 bp, Artificial Sequence
  primer
gtaaaacgacggccagtaaacatccaggcaaaccaaa

SEQ ID NO: 104930 - DNA, 39 bp, Artificial Sequence
  primer
gtaaaacgacggccagtgacctggccttcaaagtttacc

SEQ ID NO: 104931 - DNA, 37 bp, Artificial Sequence
  primer
gtaaaacgacggccagtcaggaggaaactcaacaccc

SEQ ID NO: 104932 - DNA, 38 bp, Artificial Sequence
  primer
gtaaaacgacggccagtccatttggtccagtcagagac

SEQ ID NO: 104933 - DNA, 25 bp, Artificial Sequence
  primer
tcttagctgtagacaaacatcctgc

SEQ ID NO: 104934 - DNA, 21 bp, Artificial Sequence
  primer
gactgactggtgtccttgtgg

SEQ ID NO: 104935 - DNA, 40 bp, Artificial Sequence
  primer
gtaaaacgacggccagttttagctccaggcagaaatgtag

SEQ ID NO: 104936 - DNA, 38 bp, Artificial Sequence
  primer
gtaaaacgacggccagtaaagccattgtgcctagatcc

SEQ ID NO: 104937 - DNA, 21 bp, Artificial Sequence
  primer
aggccaaagtgatttgctgac

SEQ ID NO: 104938 - DNA, 21 bp, Artificial Sequence
  primer
acccagggtgactctcaacag

SEQ ID NO: 104939 - DNA, 26 bp, Artificial Sequence
  primer
acatgtgaccctatttaattcagaaa

SEQ ID NO: 104940 - DNA, 22 bp, Artificial Sequence
  primer
tctgccttaatggcaaagtagc

SEQ ID NO: 104941 - DNA, 38 bp, Artificial Sequence
  primer
gtaaaacgacggccagtacaggtgggtttgatgtaacg

SEQ ID NO: 104942 - DNA, 21 bp, Artificial Sequence
  primer
tgatttggtcttgctggaatc

SEQ ID NO: 104943 - DNA, 21 bp, Artificial Sequence
  primer
gactccaactcctcttcgtgg

SEQ ID NO: 104944 - DNA, 36 bp, Artificial Sequence
  primer
gtaaaacgacggccagtcctcagggattagcgaccc

SEQ ID NO: 104945 - DNA, 38 bp, Artificial Sequence
  primer
gtaaaacgacggccagtgtgctaaactggtcgggaaag

SEQ ID NO: 104946 - DNA, 21 bp, Artificial Sequence
  primer
ggcaacactcacttgttcctg

SEQ ID NO: 104947 - DNA, 40 bp, Artificial Sequence
  primer
gtaaaacgacggccagttgggataagataacagtggtgaa

SEQ ID NO: 104948 - DNA, 39 bp, Artificial Sequence
  primer
gtaaaacgacggccagtttcacatgcatccaaatttctc

SEQ ID NO: 104949 - DNA, 23 bp, Artificial Sequence
  primer
caactatgcttcacatcccattg

SEQ ID NO: 104950 - DNA, 38 bp, Artificial Sequence
  primer
gtaaaacgacggccagttaggcgacctttctgaatgaa

SEQ ID NO: 104951 - DNA, 41 bp, Artificial Sequence
  primer
gtaaaacgacggccagtaaccagttcaaattctcttctcca

SEQ ID NO: 104952 - DNA, 21 bp, Artificial Sequence
  primer
ggaaagaaacagccaggacac

SEQ ID NO: 104953 - DNA, 38 bp, Artificial Sequence
  primer
gtaaaacgacggccagttggaagcacttgacctgagtc

SEQ ID NO: 104954 - DNA, 41 bp, Artificial Sequence
  primer
gtaaaacgacggccagtcttactcaaccctcaacgtacatc

SEQ ID NO: 104955 - DNA, 25 bp, Artificial Sequence
  primer
aaacaccttggaatatacaaactgg

SEQ ID NO: 104956 - DNA, 20 bp, Artificial Sequence
  primer
tcgcagcaatccattcaaag

SEQ ID NO: 104957 - DNA, 28 bp, Artificial Sequence
  primer
ctgtacattctgttcccaaatatttcta

SEQ ID NO: 104958 - DNA, 44 bp, Artificial Sequence
  primer
gtaaaacgacggccagtaagggtatatactacaaagatggttca

SEQ ID NO: 104959 - DNA, 42 bp, Artificial Sequence
  primer
gtaaaacgacggccagtcataacccagacaagaaagtactcc

SEQ ID NO: 104960 - DNA, 23 bp, Artificial Sequence
  primer
ggaagggacattacttaattggg

SEQ ID NO: 104961 - DNA, 38 bp, Artificial Sequence
  primer
gtaaaacgacggccagtctccacgcattactcctcctg

SEQ ID NO: 104962 - DNA, 18 bp, Artificial Sequence
  primer
gtctgccaccacacccag

SEQ ID NO: 104963 - DNA, 21 bp, Artificial Sequence
  primer
cagcatcttgcaaggtcaaat

SEQ ID NO: 104964 - DNA, 40 bp, Artificial Sequence
  primer
gtaaaacgacggccagttcataatcaagaggcagtcacac

SEQ ID NO: 104965 - DNA, 21 bp, Artificial Sequence
  primer
tatgcgagaacagaggtccag

SEQ ID NO: 104966 - DNA, 27 bp, Artificial Sequence
  primer
agagtctctcttcttaatgcagtgttc

SEQ ID NO: 104967 - DNA, 18 bp, Artificial Sequence
  primer
ccaccagtcccaccctct

SEQ ID NO: 104968 - DNA, 38 bp, Artificial Sequence
  primer
gtaaaacgacggccagtaccatctgtaagctttgtgcg

SEQ ID NO: 104969 - DNA, 39 bp, Artificial Sequence
  primer
gtaaaacgacggccagtttaaagccacagttaaccaccc

SEQ ID NO: 104970 - DNA, 26 bp, Artificial Sequence
  primer
ggagagcttcctgttaaacatagttc

SEQ ID NO: 104971 - DNA, 46 bp, Artificial Sequence
  primer
gtaaaacgacggccagtaatctaaatcactctctaaacctaaatgg

SEQ ID NO: 104972 - DNA, 21 bp, Artificial Sequence
  primer
ccttccaaatatggcatcctc

SEQ ID NO: 104973 - DNA, 38 bp, Artificial Sequence
  primer
gtaaaacgacggccagtgatcaaagctgagaaacgctg

SEQ ID NO: 104974 - DNA, 22 bp, Artificial Sequence
  primer
tcccattgagatggaaatcaag

SEQ ID NO: 104975 - DNA, 21 bp, Artificial Sequence
  primer
tgcatttaagcctaggatggc

SEQ ID NO: 104976 - DNA, 41 bp, Artificial Sequence
  primer
gtaaaacgacggccagtaacaacaaagaggtatacatgccc

SEQ ID NO: 104977 - DNA, 41 bp, Artificial Sequence
  primer
gtaaaacgacggccagtaacattgttcttcacaagctttcc

SEQ ID NO: 104978 - DNA, 21 bp, Artificial Sequence
  primer
cacagcttgcatttccatctc

SEQ ID NO: 104979 - DNA, 23 bp, Artificial Sequence
  primer
ggcatcccatagatattgtaccc

SEQ ID NO: 104980 - DNA, 20 bp, Artificial Sequence
  primer
acttcaccatgcaaccaagc

SEQ ID NO: 104981 - DNA, 21 bp, Artificial Sequence
  primer
ctggcctcaattccaagtttc

SEQ ID NO: 104982 - DNA, 21 bp, Artificial Sequence
  primer
ctgacagatggcaggtctgtg

SEQ ID NO: 104983 - DNA, 21 bp, Artificial Sequence
  primer
tgcctatccacctaccacaag

SEQ ID NO: 104984 - DNA, 38 bp, Artificial Sequence
  primer
gtaaaacgacggccagtgtcaggcctctctcctcactc

SEQ ID NO: 104985 - DNA, 38 bp, Artificial Sequence
  primer
gtaaaacgacggccagtcagcacaaacagcttcaggtc

SEQ ID NO: 104986 - DNA, 19 bp, Artificial Sequence
  primer
aggctggtcctcctgatcc

SEQ ID NO: 104987 - DNA, 21 bp, Artificial Sequence
  primer
ggcgagaagctagggaagaag

SEQ ID NO: 104988 - DNA, 23 bp, Artificial Sequence
  primer
ggttataggagttcctctgctgc

SEQ ID NO: 104989 - DNA, 38 bp, Artificial Sequence
  primer
gtaaaacgacggccagttcagttccactctcacttggg

SEQ ID NO: 104990 - DNA, 38 bp, Artificial Sequence
  primer
gtaaaacgacggccagtcataccactaccaccaccacc

SEQ ID NO: 104991 - DNA, 25 bp, Artificial Sequence
  primer
ttaaatagttcaaagcaggtgatcc

SEQ ID NO: 104992 - DNA, 25 bp, Artificial Sequence
  primer
ggtgagttcacattaagcaacaaag

SEQ ID NO: 104993 - DNA, 38 bp, Artificial Sequence
  primer
gtaaaacgacggccagtagcccgaacacactcagattc

SEQ ID NO: 104994 - DNA, 28 bp, Artificial Sequence
  primer
tgttcaactactttcatatttcaacagg

SEQ ID NO: 104995 - DNA, 25 bp, Artificial Sequence
  primer
tgattcctaactggctaagtaattg

SEQ ID NO: 104996 - DNA, 37 bp, Artificial Sequence
  primer
gtaaaacgacggccagtgtactggtccactgcccagg

SEQ ID NO: 104997 - DNA, 21 bp, Artificial Sequence
  primer
tgctcctgctctgtccaatag

SEQ ID NO: 104998 - DNA, 42 bp, Artificial Sequence
  primer
gtaaaacgacggccagtttattaactcgttagggtatgaggc

SEQ ID NO: 104999 - DNA, 39 bp, Artificial Sequence
  primer
gtaaaacgacggccagtgatgcatgtattgatagctggg

SEQ ID NO: 105000 - DNA, 38 bp, Artificial Sequence
  primer
gtaaaacgacggccagtagaaagtgcctccgaagactg

SEQ ID NO: 105001 - DNA, 21 bp, Artificial Sequence
  primer
caggacttggaagtgagaggg

SEQ ID NO: 105002 - DNA, 38 bp, Artificial Sequence
  primer
gtaaaacgacggccagtgaaagaggagctggacattgc

SEQ ID NO: 105003 - DNA, 21 bp, Artificial Sequence
  primer
tcagctacccaattcatgctc

SEQ ID NO: 105004 - DNA, 39 bp, Artificial Sequence
  primer
gtaaaacgacggccagttggtctatactcctttcagcgg

SEQ ID NO: 105005 - DNA, 20 bp, Artificial Sequence
  primer
gagaggagaggcagggtcag

SEQ ID NO: 105006 - DNA, 38 bp, Artificial Sequence
  primer
gtaaaacgacggccagtggtgccatgaaacaatcagtg

SEQ ID NO: 105007 - DNA, 24 bp, Artificial Sequence
  primer
cattatcagaaagaggaggtcagc

SEQ ID NO: 105008 - DNA, 44 bp, Artificial Sequence
  primer
gtaaaacgacggccagtgagactatgtatagctgactggaaacc

SEQ ID NO: 105009 - DNA, 38 bp, Artificial Sequence
  primer
gtaaaacgacggccagttcataaggtgcctttcttccc

SEQ ID NO: 105010 - DNA, 21 bp, Artificial Sequence
  primer
gaacactgtaagccctgaggc

SEQ ID NO: 105011 - DNA, 21 bp, Artificial Sequence
  primer
gtcttgctgttcctgttgctg

SEQ ID NO: 105012 - DNA, 21 bp, Artificial Sequence
  primer
gagcaccgttattagccgaag

SEQ ID NO: 105013 - DNA, 38 bp, Artificial Sequence
  primer
gtaaaacgacggccagtttcaaaggcgagatggagttc

SEQ ID NO: 105014 - DNA, 38 bp, Artificial Sequence
  primer
gtaaaacgacggccagttgatgtgaatacgggcacttc

SEQ ID NO: 105015 - DNA, 21 bp, Artificial Sequence
  primer
tacctggtatcacgatggctc

SEQ ID NO: 105016 - DNA, 38 bp, Artificial Sequence
  primer
gtaaaacgacggccagtttcaggacagggaatcagttg

SEQ ID NO: 105017 - DNA, 39 bp, Artificial Sequence
  primer
gtaaaacgacggccagttcaaagctatgcttcatttccc

SEQ ID NO: 105018 - DNA, 38 bp, Artificial Sequence
  primer
gtaaaacgacggccagtaagcagggctgactattggag

SEQ ID NO: 105019 - DNA, 41 bp, Artificial Sequence
  primer
gtaaaacgacggccagttgcaagtttaacaatgcaacattt

SEQ ID NO: 105020 - DNA, 35 bp, Artificial Sequence
  primer
gtaaaacgacggccagtatgcccagccgtgaaatc

SEQ ID NO: 105021 - DNA, 22 bp, Artificial Sequence
  primer
tcatccctacttgacagatggg

SEQ ID NO: 105022 - DNA, 21 bp, Artificial Sequence
  primer
cggatggattgagattgaatg

SEQ ID NO: 105023 - DNA, 37 bp, Artificial Sequence
  primer
gtaaaacgacggccagtcgtgaagaggttgaggaagg

SEQ ID NO: 105024 - DNA, 21 bp, Artificial Sequence
  primer
caggaacaccagttctggctc

SEQ ID NO: 105025 - DNA, 19 bp, Artificial Sequence
  primer
caaagggtaggaggcccag

SEQ ID NO: 105026 - DNA, 21 bp, Artificial Sequence
  primer
ctatggcttatatcggcgtgg

SEQ ID NO: 105027 - DNA, 19 bp, Artificial Sequence
  primer
tacgctcctcctcctgctg

SEQ ID NO: 105028 - DNA, 38 bp, Artificial Sequence
  primer
gtaaaacgacggccagtcagaactagggcgaaggtgag

SEQ ID NO: 105029 - DNA, 20 bp, Artificial Sequence
  primer
gtgtgagggagagctgaggg

SEQ ID NO: 105030 - DNA, 20 bp, Artificial Sequence
  primer
agaagggattgggacctgag

SEQ ID NO: 105031 - DNA, 38 bp, Artificial Sequence
  primer
gtaaaacgacggccagtgtctcatagctgagggctgtg

SEQ ID NO: 105032 - DNA, 21 bp, Artificial Sequence
  primer
tatgggtccctggaagttgac

SEQ ID NO: 105033 - DNA, 38 bp, Artificial Sequence
  primer
gtaaaacgacggccagtcttgggttagaggtaaacggc

SEQ ID NO: 105034 - DNA, 40 bp, Artificial Sequence
  primer
gtaaaacgacggccagtggaacatgatcctttgtggataa

SEQ ID NO: 105035 - DNA, 21 bp, Artificial Sequence
  primer
gtactgcttgaaacgtcccac

SEQ ID NO: 105036 - DNA, 21 bp, Artificial Sequence
  primer
gaagagcagacaggaagctgg

SEQ ID NO: 105037 - DNA, 21 bp, Artificial Sequence
  primer
acaatgcatgctggagacttc

SEQ ID NO: 105038 - DNA, 21 bp, Artificial Sequence
  primer
catgacacatctcctcttgcc

SEQ ID NO: 105039 - DNA, 22 bp, Artificial Sequence
  primer
aaggatggctagagttgggaac

SEQ ID NO: 105040 - DNA, 21 bp, Artificial Sequence
  primer
agagtgaagggcctattgtgc

SEQ ID NO: 105041 - DNA, 21 bp, Artificial Sequence
  primer
ttgcgtttagtcaacccagag

SEQ ID NO: 105042 - DNA, 40 bp, Artificial Sequence
  primer
gtaaaacgacggccagttggattccttctgggtgaataag

SEQ ID NO: 105043 - DNA, 39 bp, Artificial Sequence
  primer
gtaaaacgacggccagtttagggttgcagtaacctggag

SEQ ID NO: 105044 - DNA, 21 bp, Artificial Sequence
  primer
taataccttgtaggcggaggc

SEQ ID NO: 105045 - DNA, 21 bp, Artificial Sequence
  primer
cagtgggacagagagggaatc

SEQ ID NO: 105046 - DNA, 39 bp, Artificial Sequence
  primer
gtaaaacgacggccagtgatggcttagcagtctttctgc

SEQ ID NO: 105047 - DNA, 21 bp, Artificial Sequence
  primer
taagctcctcacaaacaagcg

SEQ ID NO: 105048 - DNA, 38 bp, Artificial Sequence
  primer
gtaaaacgacggccagtgctattcccattgtttccctg

SEQ ID NO: 105049 - DNA, 38 bp, Artificial Sequence
  primer
gtaaaacgacggccagttgaaccagtgaaacaccttgc

SEQ ID NO: 105050 - DNA, 39 bp, Artificial Sequence
  primer
gtaaaacgacggccagttcactagcttacaaactggccc

SEQ ID NO: 105051 - DNA, 36 bp, Artificial Sequence
  primer
gtaaaacgacggccagtgcagtgagccacagtggtg

SEQ ID NO: 105052 - DNA, 38 bp, Artificial Sequence
  primer
gtaaaacgacggccagttggaacagatggagaccattc

SEQ ID NO: 105053 - DNA, 38 bp, Artificial Sequence
  primer
gtaaaacgacggccagtaactcagggcttgagcagttc

SEQ ID NO: 105054 - DNA, 21 bp, Artificial Sequence
  primer
aagcagggaagggagtttcag

SEQ ID NO: 105055 - DNA, 21 bp, Artificial Sequence
  primer
aggtttctggcctctacctcc

SEQ ID NO: 105056 - DNA, 21 bp, Artificial Sequence
  primer
acaaccattatgccatccctc

SEQ ID NO: 105057 - DNA, 22 bp, Artificial Sequence
  primer
ttctctacccacctgcagtctc

SEQ ID NO: 105058 - DNA, 21 bp, Artificial Sequence
  primer
cgtcactgtcataatcggagc

SEQ ID NO: 105059 - DNA, 38 bp, Artificial Sequence
  primer
gtaaaacgacggccagtggtggatgcattcaaactcag

SEQ ID NO: 105060 - DNA, 21 bp, Artificial Sequence
  primer
tgacagcctcccatcacatag

SEQ ID NO: 105061 - DNA, 21 bp, Artificial Sequence
  primer
tcatagtcctgaaccacgctg

SEQ ID NO: 105062 - DNA, 21 bp, Artificial Sequence
  primer
tgtgggaggacagtgtattgg

SEQ ID NO: 105063 - DNA, 21 bp, Artificial Sequence
  primer
cctgagcacttgctgtctacg

SEQ ID NO: 105064 - DNA, 21 bp, Artificial Sequence
  primer
aaatccaccctctggacaatg

SEQ ID NO: 105065 - DNA, 18 bp, Artificial Sequence
  primer
gaacccaggaggtgcagg

SEQ ID NO: 105066 - DNA, 37 bp, Artificial Sequence
  primer
gtaaaacgacggccagtcttgggcctcaaccctactc

SEQ ID NO: 105067 - DNA, 21 bp, Artificial Sequence
  primer
agtgagaagggttgggttgtg

SEQ ID NO: 105068 - DNA, 21 bp, Artificial Sequence
  primer
cagacatcctggatcccagtc

SEQ ID NO: 105069 - DNA, 21 bp, Artificial Sequence
  primer
agggaaagacagcacgagaag

SEQ ID NO: 105070 - DNA, 37 bp, Artificial Sequence
  primer
gtaaaacgacggccagtgattatctgccagggaagcg

SEQ ID NO: 105071 - DNA, 22 bp, Artificial Sequence
  primer
tccctagaatgtgatggaggtg

SEQ ID NO: 105072 - DNA, 38 bp, Artificial Sequence
  primer
gtaaaacgacggccagtaggaagcatatccctcaggtg

SEQ ID NO: 105073 - DNA, 38 bp, Artificial Sequence
  primer
gtaaaacgacggccagtagtctccagtcctccctcctc

SEQ ID NO: 105074 - DNA, 21 bp, Artificial Sequence
  primer
cactatatgctgggcacttcg

SEQ ID NO: 105075 - DNA, 21 bp, Artificial Sequence
  primer
tggtgaggtgaagctcagaag

SEQ ID NO: 105076 - DNA, 38 bp, Artificial Sequence
  primer
gtaaaacgacggccagtctagtggcccaagtcttcagg

SEQ ID NO: 105077 - DNA, 21 bp, Artificial Sequence
  primer
tctgggtcccttctagctttg

SEQ ID NO: 105078 - DNA, 22 bp, Artificial Sequence
  primer
aagacctttccagagctgatcc

SEQ ID NO: 105079 - DNA, 21 bp, Artificial Sequence
  primer
actccaaactgcagctcttcc

SEQ ID NO: 105080 - DNA, 21 bp, Artificial Sequence
  primer
aaggtaaagcaaggcccagag

SEQ ID NO: 105081 - DNA, 21 bp, Artificial Sequence
  primer
tctaggattgggccagacaac

SEQ ID NO: 105082 - DNA, 20 bp, Artificial Sequence
  primer
gactccaacaaaggaagccc

SEQ ID NO: 105083 - DNA, 19 bp, Artificial Sequence
  primer
tgtgcgctcaacctacacc

SEQ ID NO: 105084 - DNA, 21 bp, Artificial Sequence
  primer
catagttcctgcccatacaaa

SEQ ID NO: 105085 - DNA, 38 bp, Artificial Sequence
  primer
gtaaaacgacggccagtgattgagtgacaaagcatggc

SEQ ID NO: 105086 - DNA, 22 bp, Artificial Sequence
  primer
ggtgaagagaaatgggttctgc

SEQ ID NO: 105087 - DNA, 21 bp, Artificial Sequence
  primer
tacggtagcacctcctcattg

SEQ ID NO: 105088 - DNA, 22 bp, Artificial Sequence
  primer
catgcctactcctcaaactgtg

SEQ ID NO: 105089 - DNA, 21 bp, Artificial Sequence
  primer
taaaccgtttgatgctatggg

SEQ ID NO: 105090 - DNA, 37 bp, Artificial Sequence
  primer
gtaaaacgacggccagttagccaggtgtagtggtggg

SEQ ID NO: 105091 - DNA, 37 bp, Artificial Sequence
  primer
gtaaaacgacggccagtcagacaacctgcctgaggac

SEQ ID NO: 105092 - DNA, 21 bp, Artificial Sequence
  primer
agccgatgaaacaaactaccc

SEQ ID NO: 105093 - DNA, 44 bp, Artificial Sequence
  primer
gtaaaacgacggccagtaaataacaaagactagtgagcctttcc

SEQ ID NO: 105094 - DNA, 21 bp, Artificial Sequence
  primer
accaacctggtgcaattcttc

SEQ ID NO: 105095 - DNA, 42 bp, Artificial Sequence
  primer
gtaaaacgacggccagttcttgccctgactttgtattatgac

SEQ ID NO: 105096 - DNA, 21 bp, Artificial Sequence
  primer
aactgcctggttgtagatggg

SEQ ID NO: 105097 - DNA, 21 bp, Artificial Sequence
  primer
tgaattgactgggcaaagatg

SEQ ID NO: 105098 - DNA, 42 bp, Artificial Sequence
  primer
gtaaaacgacggccagtggctcatgaattaagggtaaatgtc

SEQ ID NO: 105099 - DNA, 21 bp, Artificial Sequence
  primer
atggatatgacaccacctggg

SEQ ID NO: 105100 - DNA, 37 bp, Artificial Sequence
  primer
gtaaaacgacggccagtcaagtgtctggtttgggctg

SEQ ID NO: 105101 - DNA, 21 bp, Artificial Sequence
  primer
tgataatgtgggtggaaaggg

SEQ ID NO: 105102 - DNA, 21 bp, Artificial Sequence
  primer
cgagactccacctcaacacac

SEQ ID NO: 105103 - DNA, 21 bp, Artificial Sequence
  primer
tagcccttgtttcttccatcg

SEQ ID NO: 105104 - DNA, 38 bp, Artificial Sequence
  primer
gtaaaacgacggccagtttgcctcttgctgtttcattg

SEQ ID NO: 105105 - DNA, 20 bp, Artificial Sequence
  primer
ccatgaccacccatgcttac

SEQ ID NO: 105106 - DNA, 38 bp, Artificial Sequence
  primer
gtaaaacgacggccagtagacttgaacaaagctgcctg

SEQ ID NO: 105107 - DNA, 37 bp, Artificial Sequence
  primer
gtaaaacgacggccagtcactttctgcccaggatcag

SEQ ID NO: 105108 - DNA, 38 bp, Artificial Sequence
  primer
gtaaaacgacggccagtcctggcgagttaatctcactg

SEQ ID NO: 105109 - DNA, 38 bp, Artificial Sequence
  primer
gtaaaacgacggccagtatcatggctttctcttgcctg

SEQ ID NO: 105110 - DNA, 38 bp, Artificial Sequence
  primer
gtaaaacgacggccagtgagtgagatgggtcttacggc

SEQ ID NO: 105111 - DNA, 38 bp, Artificial Sequence
  primer
gtaaaacgacggccagtgtgttgcttcaagaatggtgg

SEQ ID NO: 105112 - DNA, 21 bp, Artificial Sequence
  primer
caagggcttaacagatccagg

SEQ ID NO: 105113 - DNA, 37 bp, Artificial Sequence
  primer
gtaaaacgacggccagtcggaggtttaggatcgaagc

SEQ ID NO: 105114 - DNA, 37 bp, Artificial Sequence
  primer
gtaaaacgacggccagtgctgggaagggtcaaatctc

SEQ ID NO: 105115 - DNA, 38 bp, Artificial Sequence
  primer
gtaaaacgacggccagtcaccttactagccttcagcgg

SEQ ID NO: 105116 - DNA, 21 bp, Artificial Sequence
  primer
ctccttcctcaaccacaggtc

SEQ ID NO: 105117 - DNA, 38 bp, Artificial Sequence
  primer
gtaaaacgacggccagtgtcggacacacattccatcac

SEQ ID NO: 105118 - DNA, 38 bp, Artificial Sequence
  primer
gtaaaacgacggccagttagccagctgactgctttgtc

SEQ ID NO: 105119 - DNA, 37 bp, Artificial Sequence
  primer
gtaaaacgacggccagtaaagagcctgggtgcctaag

SEQ ID NO: 105120 - DNA, 21 bp, Artificial Sequence
  primer
ttctatgacagccaggtcagc

SEQ ID NO: 105121 - DNA, 21 bp, Artificial Sequence
  primer
ctagagcagaaggagatgggc

SEQ ID NO: 105122 - DNA, 21 bp, Artificial Sequence
  primer
ggcctcatttctactgatggg

SEQ ID NO: 105123 - DNA, 18 bp, Artificial Sequence
  primer
cccaccctccacacacac

SEQ ID NO: 105124 - DNA, 38 bp, Artificial Sequence
  primer
gtaaaacgacggccagtccagtgcatggctcactacag

SEQ ID NO: 105125 - DNA, 21 bp, Artificial Sequence
  primer
tcttggatgtctgattcccac

SEQ ID NO: 105126 - DNA, 21 bp, Artificial Sequence
  primer
ttcaaccagggctttgaagag

SEQ ID NO: 105127 - DNA, 22 bp, Artificial Sequence
  primer
gagcccagatttatgtcaatgg

SEQ ID NO: 105128 - DNA, 21 bp, Artificial Sequence
  primer
gcagtctacctccactgaggc

SEQ ID NO: 105129 - DNA, 21 bp, Artificial Sequence
  primer
aggaccctgaacactttggag

SEQ ID NO: 105130 - DNA, 39 bp, Artificial Sequence
  primer
gtaaaacgacggccagtcatttccctaaggtcaaggagg

SEQ ID NO: 105131 - DNA, 20 bp, Artificial Sequence
  primer
acacccagacctgacacacc

SEQ ID NO: 105132 - DNA, 21 bp, Artificial Sequence
  primer
tgactcctactcccttcggtg

SEQ ID NO: 105133 - DNA, 38 bp, Artificial Sequence
  primer
gtaaaacgacggccagtaggcacacagatgtcccaaag

SEQ ID NO: 105134 - DNA, 20 bp, Artificial Sequence
  primer
ctgcaaggctttcactgctc

SEQ ID NO: 105135 - DNA, 19 bp, Artificial Sequence
  primer
gaatggcagagatgggagc

SEQ ID NO: 105136 - DNA, 21 bp, Artificial Sequence
  primer
taaccttaccacaagggccac

SEQ ID NO: 105137 - DNA, 21 bp, Artificial Sequence
  primer
tccatgaaagggtcagacttg

SEQ ID NO: 105138 - DNA, 38 bp, Artificial Sequence
  primer
gtaaaacgacggccagtgggttcaggttgttcttcacc

SEQ ID NO: 105139 - DNA, 21 bp, Artificial Sequence
  primer
cagtctgctagggactttggc

SEQ ID NO: 105140 - DNA, 21 bp, Artificial Sequence
  primer
tctcttcagcatcaccctcag

SEQ ID NO: 105141 - DNA, 21 bp, Artificial Sequence
  primer
tttgaaacaagggaagggttg

SEQ ID NO: 105142 - DNA, 21 bp, Artificial Sequence
  primer
gattctgggctccttcctttc

SEQ ID NO: 105143 - DNA, 21 bp, Artificial Sequence
  primer
tttccctcgcatctagcctac

SEQ ID NO: 105144 - DNA, 21 bp, Artificial Sequence
  primer
ttccgggtcaaagttgatagc

SEQ ID NO: 105145 - DNA, 21 bp, Artificial Sequence
  primer
aagcagtgggagagttggatg

SEQ ID NO: 105146 - DNA, 21 bp, Artificial Sequence
  primer
agcaccgagtacttctgaggg

SEQ ID NO: 105147 - DNA, 38 bp, Artificial Sequence
  primer
gtaaaacgacggccagtatggtggaagacgaaggtcag

SEQ ID NO: 105148 - DNA, 38 bp, Artificial Sequence
  primer
gtaaaacgacggccagtcctagttgggctctaccaagc

SEQ ID NO: 105149 - DNA, 35 bp, Artificial Sequence
  primer
gtaaaacgacggccagtctctggtctccgcatccc

SEQ ID NO: 105150 - DNA, 21 bp, Artificial Sequence
  primer
tggtacatcagccttgaatcg

SEQ ID NO: 105151 - DNA, 18 bp, Artificial Sequence
  primer
gggactacaggcacgcac

SEQ ID NO: 105152 - DNA, 21 bp, Artificial Sequence
  primer
ctgtaagtcagaggcgtcagg

SEQ ID NO: 105153 - DNA, 21 bp, Artificial Sequence
  primer
gcctgagaggaggtgtctgtg

SEQ ID NO: 105154 - DNA, 21 bp, Artificial Sequence
  primer
cacgtctcacacgggacatag

SEQ ID NO: 105155 - DNA, 21 bp, Artificial Sequence
  primer
ctgcaggaagtggaaggtagg

SEQ ID NO: 105156 - DNA, 21 bp, Artificial Sequence
  primer
cgagagtcgtaatcccagacc

SEQ ID NO: 105157 - DNA, 21 bp, Artificial Sequence
  primer
acctcctcacctgacacttcc

SEQ ID NO: 105158 - DNA, 38 bp, Artificial Sequence
  primer
gtaaaacgacggccagtgggtccatccaacaatcagag

SEQ ID NO: 105159 - DNA, 21 bp, Artificial Sequence
  primer
gcacctgtcatagctgacctg

SEQ ID NO: 105160 - DNA, 38 bp, Artificial Sequence
  primer
gtaaaacgacggccagtccatcctacagtctccggttc

SEQ ID NO: 105161 - DNA, 20 bp, Artificial Sequence
  primer
ggcacctacagaggctttcc

SEQ ID NO: 105162 - DNA, 21 bp, Artificial Sequence
  primer
gcacctttgagggagacgtag

SEQ ID NO: 105163 - DNA, 35 bp, Artificial Sequence
  primer
gtaaaacgacggccagtacatccactggcgtgagc

SEQ ID NO: 105164 - DNA, 21 bp, Artificial Sequence
  primer
tccaagtccctcatgatctcc

SEQ ID NO: 105165 - DNA, 20 bp, Artificial Sequence
  primer
gagcccaccgcttctaattc

SEQ ID NO: 105166 - DNA, 38 bp, Artificial Sequence
  primer
gtaaaacgacggccagtcttgggaccattctcctgttg

SEQ ID NO: 105167 - DNA, 24 bp, Artificial Sequence
  primer
ctcacaagaaggtcataaatcagc

SEQ ID NO: 105168 - DNA, 38 bp, Artificial Sequence
  primer
gtaaaacgacggccagtctcagtgcaaccataggaccc

SEQ ID NO: 105169 - DNA, 39 bp, Artificial Sequence
  primer
gtaaaacgacggccagtcttcaaacatcactgggaactg

SEQ ID NO: 105170 - DNA, 21 bp, Artificial Sequence
  primer
gcattcaccaattccaaactg

SEQ ID NO: 105171 - DNA, 42 bp, Artificial Sequence
  primer
gtaaaacgacggccagtctggtcatagggctaagtacctaaa

SEQ ID NO: 105172 - DNA, 27 bp, Artificial Sequence
  primer
catttatcaatttaatgagcttctctg

SEQ ID NO: 105173 - DNA, 21 bp, Artificial Sequence
  primer
gccaacttatcccacttcctc

SEQ ID NO: 105174 - DNA, 43 bp, Artificial Sequence
  primer
gtaaaacgacggccagttcatgtaaatgcatcagtaacatttg

SEQ ID NO: 105175 - DNA, 39 bp, Artificial Sequence
  primer
gtaaaacgacggccagtaacctttggcaattatgctttg

SEQ ID NO: 105176 - DNA, 24 bp, Artificial Sequence
  primer
tctacaagaagccaagtcactacc

SEQ ID NO: 105177 - DNA, 38 bp, Artificial Sequence
  primer
gtaaaacgacggccagtcctcgtggtagcgcttgttac

SEQ ID NO: 105178 - DNA, 45 bp, Artificial Sequence
  primer
gtaaaacgacggccagtaagcttgctacttgactgactaaagaat

SEQ ID NO: 105179 - DNA, 25 bp, Artificial Sequence
  primer
gagtcatgctagcaacaatgttatg

SEQ ID NO: 105180 - DNA, 20 bp, Artificial Sequence
  primer
aatctgctgcaaaggtgtgg

SEQ ID NO: 105181 - DNA, 38 bp, Artificial Sequence
  primer
gtaaaacgacggccagtagaatggcagaaacccaagag

SEQ ID NO: 105182 - DNA, 26 bp, Artificial Sequence
  primer
ttctaaccataatgtatgagggaagc

SEQ ID NO: 105183 - DNA, 38 bp, Artificial Sequence
  primer
gtaaaacgacggccagttacagagcaccaggcacaaag

SEQ ID NO: 105184 - DNA, 37 bp, Artificial Sequence
  primer
gtaaaacgacggccagtagaagccagctgcattggtc

SEQ ID NO: 105185 - DNA, 21 bp, Artificial Sequence
  primer
gtgaaccattctttgcccatc

SEQ ID NO: 105186 - DNA, 38 bp, Artificial Sequence
  primer
gtaaaacgacggccagtgcaaactgattctgcatagcc

SEQ ID NO: 105187 - DNA, 21 bp, Artificial Sequence
  primer
atgtgaaagaagcgtggtttg

SEQ ID NO: 105188 - DNA, 38 bp, Artificial Sequence
  primer
gtaaaacgacggccagtgagccggaatggataacattg

SEQ ID NO: 105189 - DNA, 21 bp, Artificial Sequence
  primer
ggaagcccagaaagctgtacc

SEQ ID NO: 105190 - DNA, 21 bp, Artificial Sequence
  primer
ggtaaagcagcatttaacccg

SEQ ID NO: 105191 - DNA, 20 bp, Artificial Sequence
  primer
ctgttcctctcccgcctatc

SEQ ID NO: 105192 - DNA, 24 bp, Artificial Sequence
  primer
tttctttacaaccataacacaccg

SEQ ID NO: 105193 - DNA, 38 bp, Artificial Sequence
  primer
gtaaaacgacggccagtggtctccagaatcagcagctc

SEQ ID NO: 105194 - DNA, 38 bp, Artificial Sequence
  primer
gtaaaacgacggccagtgctagtgaccctttcgtgtcc

SEQ ID NO: 105195 - DNA, 36 bp, Artificial Sequence
  primer
gtaaaacgacggccagtggcatatgaacccgaatgg

SEQ ID NO: 105196 - DNA, 38 bp, Artificial Sequence
  primer
gtaaaacgacggccagtaattgcctttacattgcctcc

SEQ ID NO: 105197 - DNA, 44 bp, Artificial Sequence
  primer
gtaaaacgacggccagtttcataagcagaagagggtatttagtg

SEQ ID NO: 105198 - DNA, 38 bp, Artificial Sequence
  primer
gtaaaacgacggccagttatctgacaacacaacacccg

SEQ ID NO: 105199 - DNA, 21 bp, Artificial Sequence
  primer
ctgtgggattcaccatgtcac

SEQ ID NO: 105200 - DNA, 38 bp, Artificial Sequence
  primer
gtaaaacgacggccagtgactaaggcacgggtaactgc

SEQ ID NO: 105201 - DNA, 38 bp, Artificial Sequence
  primer
gtaaaacgacggccagtgccttgtaagggacacctttg

SEQ ID NO: 105202 - DNA, 37 bp, Artificial Sequence
  primer
gtaaaacgacggccagtacaaggcatggtgcaacttc

SEQ ID NO: 105203 - DNA, 38 bp, Artificial Sequence
  primer
gtaaaacgacggccagtgaggaagaaagtttggccatc

SEQ ID NO: 105204 - DNA, 38 bp, Artificial Sequence
  primer
gtaaaacgacggccagttctgcttggcacttctgaatc

SEQ ID NO: 105205 - DNA, 21 bp, Artificial Sequence
  primer
cccttaggcactgagggaaac

SEQ ID NO: 105206 - DNA, 40 bp, Artificial Sequence
  primer
gtaaaacgacggccagttgctatgagatccctttctaccc

SEQ ID NO: 105207 - DNA, 26 bp, Artificial Sequence
  primer
tgaaagaatgcataagtttctctgtg

SEQ ID NO: 105208 - DNA, 22 bp, Artificial Sequence
  primer
cagccctttgagggtatagagc

SEQ ID NO: 105209 - DNA, 39 bp, Artificial Sequence
  primer
gtaaaacgacggccagtgaaatggcaggtaagtgctctg

SEQ ID NO: 105210 - DNA, 24 bp, Artificial Sequence
  primer
tgaggtgatggttatcctagtgtg

SEQ ID NO: 105211 - DNA, 21 bp, Artificial Sequence
  primer
tttggtttctcgaatttccac

SEQ ID NO: 105212 - DNA, 47 bp, Artificial Sequence
  primer
gtaaaacgacggccagttgacagtctattacaatattaccagtcatc

SEQ ID NO: 105213 - DNA, 40 bp, Artificial Sequence
  primer
gtaaaacgacggccagtcagaaagttgaaattcttgctcg

SEQ ID NO: 105214 - DNA, 22 bp, Artificial Sequence
  primer
tggctgtttgctaactgctttc

SEQ ID NO: 105215 - DNA, 40 bp, Artificial Sequence
  primer
gtaaaacgacggccagtgccttgataaaccacttcatctc

SEQ ID NO: 105216 - DNA, 21 bp, Artificial Sequence
  primer
ctggcatgaagagttgcactg

SEQ ID NO: 105217 - DNA, 21 bp, Artificial Sequence
  primer
tatccgccttacttcacaggg

SEQ ID NO: 105218 - DNA, 40 bp, Artificial Sequence
  primer
gtaaaacgacggccagttcagggtgctataaatgatttgg

SEQ ID NO: 105219 - DNA, 23 bp, Artificial Sequence
  primer
atccaggcaactttaacactgtc

SEQ ID NO: 105220 - DNA, 38 bp, Artificial Sequence
  primer
gtaaaacgacggccagtcaatttgcccttaaatccagg

SEQ ID NO: 105221 - DNA, 38 bp, Artificial Sequence
  primer
gtaaaacgacggccagtaacctgccatttgtcttctgg

SEQ ID NO: 105222 - DNA, 38 bp, Artificial Sequence
  primer
gtaaaacgacggccagtgcatcaaccggatgagtattg

SEQ ID NO: 105223 - DNA, 21 bp, Artificial Sequence
  primer
tctcctgacctcatgatccac

SEQ ID NO: 105224 - DNA, 20 bp, Artificial Sequence
  primer
gacctgcatttgagtcccac

SEQ ID NO: 105225 - DNA, 19 bp, Artificial Sequence
  primer
cactggcagccctttcttc

SEQ ID NO: 105226 - DNA, 23 bp, Artificial Sequence
  primer
tcaacattcagtcaacattcagg

SEQ ID NO: 105227 - DNA, 22 bp, Artificial Sequence
  primer
ggtccttaaactggctgtgatg

SEQ ID NO: 105228 - DNA, 21 bp, Artificial Sequence
  primer
tgccttcaaggtttctcattc

SEQ ID NO: 105229 - DNA, 25 bp, Artificial Sequence
  primer
ggaaatatgatacccatgacacatc

SEQ ID NO: 105230 - DNA, 21 bp, Artificial Sequence
  primer
acccaggtgactcagagcaag

SEQ ID NO: 105231 - DNA, 39 bp, Artificial Sequence
  primer
gtaaaacgacggccagtctcagttgctctttgtctggtg

SEQ ID NO: 105232 - DNA, 24 bp, Artificial Sequence
  primer
tccctagtccaaccctttagttag

SEQ ID NO: 105233 - DNA, 44 bp, Artificial Sequence
  primer
gtaaaacgacggccagttggatgtctagataaatacctggaaga

SEQ ID NO: 105234 - DNA, 38 bp, Artificial Sequence
  primer
gtaaaacgacggccagttcctggaagttgccataaacg

SEQ ID NO: 105235 - DNA, 27 bp, Artificial Sequence
  primer
tcaattgtgcttaagctaaactttctc

SEQ ID NO: 105236 - DNA, 42 bp, Artificial Sequence
  primer
gtaaaacgacggccagttggagagtgaaacttgacaatcatc

SEQ ID NO: 105237 - DNA, 21 bp, Artificial Sequence
  primer
ttgcttgatcaccaactgtcc

SEQ ID NO: 105238 - DNA, 42 bp, Artificial Sequence
  primer
gtaaaacgacggccagttctgagaaagttgtgaatcagttcc

SEQ ID NO: 105239 - DNA, 21 bp, Artificial Sequence
  primer
tcaggctgaggaacgttaagc

SEQ ID NO: 105240 - DNA, 38 bp, Artificial Sequence
  primer
gtaaaacgacggccagtacgttgccaaagaaggagaag

SEQ ID NO: 105241 - DNA, 21 bp, Artificial Sequence
  primer
tcgtactccaccacagacagc

SEQ ID NO: 105242 - DNA, 19 bp, Artificial Sequence
  primer
caggcccagcataggagac

SEQ ID NO: 105243 - DNA, 19 bp, Artificial Sequence
  primer
gaagctggacctctgcctg

SEQ ID NO: 105244 - DNA, 38 bp, Artificial Sequence
  primer
gtaaaacgacggccagttgcgtgatgttcagtgagatg

SEQ ID NO: 105245 - DNA, 20 bp, Artificial Sequence
  primer
gagttgacggcaaacaccac

SEQ ID NO: 105246 - DNA, 21 bp, Artificial Sequence
  primer
gtaggagatgaaggtggcctg

SEQ ID NO: 105247 - DNA, 38 bp, Artificial Sequence
  primer
gtaaaacgacggccagtgcagggagaattctgagttgg

SEQ ID NO: 105248 - DNA, 21 bp, Artificial Sequence
  primer
tccgtgtacttgaggaggagg

SEQ ID NO: 105249 - DNA, 38 bp, Artificial Sequence
  primer
gtaaaacgacggccagtctcgcttcttctttgagggag

SEQ ID NO: 105250 - DNA, 21 bp, Artificial Sequence
  primer
gccgtacacttcaatctcgtc

SEQ ID NO: 105251 - DNA, 21 bp, Artificial Sequence
  primer
tccaatgttcaggatgctgtc

SEQ ID NO: 105252 - DNA, 21 bp, Artificial Sequence
  primer
ggagcaaaccacaatctccag

SEQ ID NO: 105253 - DNA, 38 bp, Artificial Sequence
  primer
gtaaaacgacggccagtggaagctcaaaggttgtcacc

SEQ ID NO: 105254 - DNA, 38 bp, Artificial Sequence
  primer
gtaaaacgacggccagtgaagccacagtccagtgaagg

SEQ ID NO: 105255 - DNA, 21 bp, Artificial Sequence
  primer
gtgtccagctccatgatctcc

SEQ ID NO: 105256 - DNA, 20 bp, Artificial Sequence
  primer
ctcctcctcgtcatccactg

SEQ ID NO: 105257 - DNA, 20 bp, Artificial Sequence
  primer
caaaggagctgtccacaagg

SEQ ID NO: 105258 - DNA, 20 bp, Artificial Sequence
  primer
gtggagccatgtatgggaag

SEQ ID NO: 105259 - DNA, 21 bp, Artificial Sequence
  primer
ggcttcttctcacggaagttg

SEQ ID NO: 105260 - DNA, 38 bp, Artificial Sequence
  primer
gtaaaacgacggccagtgtggaatggagcgaaagagtc

SEQ ID NO: 105261 - DNA, 21 bp, Artificial Sequence
  primer
tctggacactccttcctggtc

SEQ ID NO: 105262 - DNA, 21 bp, Artificial Sequence
  primer
acacctgtgggttagtgaggg

SEQ ID NO: 105263 - DNA, 38 bp, Artificial Sequence
  primer
gtaaaacgacggccagtgaccaagggtgacagtcagag

SEQ ID NO: 105264 - DNA, 20 bp, Artificial Sequence
  primer
caggtcacatgctcccactc

SEQ ID NO: 105265 - DNA, 21 bp, Artificial Sequence
  primer
ccatgatcaagatctggaggg

SEQ ID NO: 105266 - DNA, 21 bp, Artificial Sequence
  primer
atgtagagctgcgtgtcgatg

SEQ ID NO: 105267 - DNA, 37 bp, Artificial Sequence
  primer
gtaaaacgacggccagtagtccacgctgtacacctcc

SEQ ID NO: 105268 - DNA, 21 bp, Artificial Sequence
  primer
catgtacaccatgaggttgcg

SEQ ID NO: 105269 - DNA, 21 bp, Artificial Sequence
  primer
atgtgcttattctcccacacg

SEQ ID NO: 105270 - DNA, 18 bp, Artificial Sequence
  primer
cgccggtaggtcttctcc

SEQ ID NO: 105271 - DNA, 38 bp, Artificial Sequence
  primer
gtaaaacgacggccagtaggtacaggtagcggttgagc

SEQ ID NO: 105272 - DNA, 20 bp, Artificial Sequence
  primer
gtctccagcaagtcgtccag

SEQ ID NO: 105273 - DNA, 38 bp, Artificial Sequence
  primer
gtaaaacgacggccagtgaccacacactcctctcaagc

SEQ ID NO: 105274 - DNA, 43 bp, Artificial Sequence
  primer
gtaaaacgacggccagtcaacaagcaaagcttataagtcaatc

SEQ ID NO: 105275 - DNA, 21 bp, Artificial Sequence
  primer
tttatcaaaggctgcatccac

SEQ ID NO: 105276 - DNA, 24 bp, Artificial Sequence
  primer
tgtatcaaggcagaatgtgctaac

SEQ ID NO: 105277 - DNA, 23 bp, Artificial Sequence
  primer
aaacactccctatttgacggttt

SEQ ID NO: 105278 - DNA, 20 bp, Artificial Sequence
  primer
gggtgaaagagcgaaagtcc

SEQ ID NO: 105279 - DNA, 38 bp, Artificial Sequence
  primer
gtaaaacgacggccagtatttaagacgcccacttccac

SEQ ID NO: 105280 - DNA, 36 bp, Artificial Sequence
  primer
gtaaaacgacggccagtaccaccactcctggctctc

SEQ ID NO: 105281 - DNA, 40 bp, Artificial Sequence
  primer
gtaaaacgacggccagtagcactgacaggatctggtattc

SEQ ID NO: 105282 - DNA, 27 bp, Artificial Sequence
  primer
tcaaattcactgaaatgaaatgataac

SEQ ID NO: 105283 - DNA, 39 bp, Artificial Sequence
  primer
gtaaaacgacggccagttcatgccaccatacttcacaag

SEQ ID NO: 105284 - DNA, 38 bp, Artificial Sequence
  primer
gtaaaacgacggccagttgtctgtctcacacatctcgg

SEQ ID NO: 105285 - DNA, 21 bp, Artificial Sequence
  primer
aaaggttccacagacccactt

SEQ ID NO: 105286 - DNA, 25 bp, Artificial Sequence
  primer
agccttcaagtcaataagacttctg

SEQ ID NO: 105287 - DNA, 38 bp, Artificial Sequence
  primer
gtaaaacgacggccagtttgggcctgtacacctgttag

SEQ ID NO: 105288 - DNA, 21 bp, Artificial Sequence
  primer
cccgttcactctatagcaggc

SEQ ID NO: 105289 - DNA, 38 bp, Artificial Sequence
  primer
gtaaaacgacggccagtcttcaggagtggaagagggac

SEQ ID NO: 105290 - DNA, 22 bp, Artificial Sequence
  primer
cagatgtctgcaatatgcttcc

SEQ ID NO: 105291 - DNA, 42 bp, Artificial Sequence
  primer
gtaaaacgacggccagtagaaacacaataggtttcaatgacc

SEQ ID NO: 105292 - DNA, 21 bp, Artificial Sequence
  primer
ttccgtgttctgacactttgc

SEQ ID NO: 105293 - DNA, 18 bp, Artificial Sequence
  primer
tgatctgcccacctcagc

SEQ ID NO: 105294 - DNA, 21 bp, Artificial Sequence
  primer
agtccagaacggtggaatgac

SEQ ID NO: 105295 - DNA, 38 bp, Artificial Sequence
  primer
gtaaaacgacggccagtcggcctcgtacctcctactac

SEQ ID NO: 105296 - DNA, 36 bp, Artificial Sequence
  primer
gtaaaacgacggccagtaaacctgtgaggaccgtgc

SEQ ID NO: 105297 - DNA, 20 bp, Artificial Sequence
  primer
actgcctgctgcacagtttc

SEQ ID NO: 105298 - DNA, 39 bp, Artificial Sequence
  primer
gtaaaacgacggccagtccacctgaagaaatgaatgcac

SEQ ID NO: 105299 - DNA, 38 bp, Artificial Sequence
  primer
gtaaaacgacggccagtaggccacaaggtgaagagaag

SEQ ID NO: 105300 - DNA, 21 bp, Artificial Sequence
  primer
ggaccgtcaggcaagaatatg

SEQ ID NO: 105301 - DNA, 22 bp, Artificial Sequence
  primer
acacacacacacacacacacac

SEQ ID NO: 105302 - DNA, 21 bp, Artificial Sequence
  primer
tgtggtggcaggcatctataa

SEQ ID NO: 105303 - DNA, 37 bp, Artificial Sequence
  primer
gtaaaacgacggccagtacaggtgagtgcagagctgg

SEQ ID NO: 105304 - DNA, 38 bp, Artificial Sequence
  primer
gtaaaacgacggccagtgcaaatgccaatatgcaacag

SEQ ID NO: 105305 - DNA, 39 bp, Artificial Sequence
  primer
gtaaaacgacggccagtttcaggctgttgaaataaaggc

SEQ ID NO: 105306 - DNA, 21 bp, Artificial Sequence
  primer
ggaccacagatgagggagttc

SEQ ID NO: 105307 - DNA, 38 bp, Artificial Sequence
  primer
gtaaaacgacggccagtgtcctagcctgtccaaaccag

SEQ ID NO: 105308 - DNA, 36 bp, Artificial Sequence
  primer
gtaaaacgacggccagtgcaggcagagacagtgtgg

SEQ ID NO: 105309 - DNA, 20 bp, Artificial Sequence
  primer
gagaggcaagggagatgagg

SEQ ID NO: 105310 - DNA, 38 bp, Artificial Sequence
  primer
gtaaaacgacggccagtgtggccataagcagggattac

SEQ ID NO: 105311 - DNA, 21 bp, Artificial Sequence
  primer
ctcgagggagatatacacggc

SEQ ID NO: 105312 - DNA, 38 bp, Artificial Sequence
  primer
gtaaaacgacggccagtggacagtctctagcccaccac

SEQ ID NO: 105313 - DNA, 21 bp, Artificial Sequence
  primer
agccaaacatgatgtcgactg

SEQ ID NO: 105314 - DNA, 20 bp, Artificial Sequence
  primer
aggctggaggatgagaaagg

SEQ ID NO: 105315 - DNA, 38 bp, Artificial Sequence
  primer
gtaaaacgacggccagttgttgaaatgaatgaccgagg

SEQ ID NO: 105316 - DNA, 27 bp, Artificial Sequence
  primer
aatcaacattgtactaaccttctggag

SEQ ID NO: 105317 - DNA, 21 bp, Artificial Sequence
  primer
caaactcctgacctcaacagg

SEQ ID NO: 105318 - DNA, 40 bp, Artificial Sequence
  primer
gtaaaacgacggccagttttcctagccacagatttgaaac

SEQ ID NO: 105319 - DNA, 38 bp, Artificial Sequence
  primer
gtaaaacgacggccagtataccttcccaagtggctcag

SEQ ID NO: 105320 - DNA, 30 bp, Artificial Sequence
  primer
catttgtttacaccactatctagttcttca

SEQ ID NO: 105321 - DNA, 36 bp, Artificial Sequence
  primer
gtaaaacgacggccagtacactctgcagtcgcttcg

SEQ ID NO: 105322 - DNA, 22 bp, Artificial Sequence
  primer
tttgtatttccctcctcattgg

SEQ ID NO: 105323 - DNA, 24 bp, Artificial Sequence
  primer
ccttccaatgtaaacaatcatgtg

SEQ ID NO: 105324 - DNA, 39 bp, Artificial Sequence
  primer
gtaaaacgacggccagtgcatggactttgtgaaatggag

SEQ ID NO: 105325 - DNA, 22 bp, Artificial Sequence
  primer
gatgcttgatcaaatttcctgg

SEQ ID NO: 105326 - DNA, 19 bp, Artificial Sequence
  primer
gtccctgttgtggaggtgg

SEQ ID NO: 105327 - DNA, 20 bp, Artificial Sequence
  primer
atcatatggtggaggtcgcc

SEQ ID NO: 105328 - DNA, 41 bp, Artificial Sequence
  primer
gtaaaacgacggccagtcagcttaaacacctcatcttcttg

SEQ ID NO: 105329 - DNA, 23 bp, Artificial Sequence
  primer
cccactacactgtgacacacaac

SEQ ID NO: 105330 - DNA, 23 bp, Artificial Sequence
  primer
cactggagaacagtgagtaaggg

SEQ ID NO: 105331 - DNA, 26 bp, Artificial Sequence
  primer
tgtttccagaagattaaattcacaag

SEQ ID NO: 105332 - DNA, 39 bp, Artificial Sequence
  primer
gtaaaacgacggccagtgccagtctgaaacacgtagacc

SEQ ID NO: 105333 - DNA, 21 bp, Artificial Sequence
  primer
gaccttaacagcacccaggag

SEQ ID NO: 105334 - DNA, 38 bp, Artificial Sequence
  primer
gtaaaacgacggccagtctcaaacctctccagccattc

SEQ ID NO: 105335 - DNA, 37 bp, Artificial Sequence
  primer
gtaaaacgacggccagtacaccgctgaaggctacttg

SEQ ID NO: 105336 - DNA, 38 bp, Artificial Sequence
  primer
gtaaaacgacggccagttcatttcagccctgttatccc

SEQ ID NO: 105337 - DNA, 20 bp, Artificial Sequence
  primer
gtgaagacgccacctctgtg

SEQ ID NO: 105338 - DNA, 18 bp, Artificial Sequence
  primer
caggcgtgagaccctgtg

SEQ ID NO: 105339 - DNA, 38 bp, Artificial Sequence
  primer
gtaaaacgacggccagttcaccagcctacaatctcagg

SEQ ID NO: 105340 - DNA, 21 bp, Artificial Sequence
  primer
gtgtttccacacacatttgcc

SEQ ID NO: 105341 - DNA, 20 bp, Artificial Sequence
  primer
gtgagtgtcaggcacacagg

SEQ ID NO: 105342 - DNA, 36 bp, Artificial Sequence
  primer
gtaaaacgacggccagtgctacaggcatgcaccacc

SEQ ID NO: 105343 - DNA, 21 bp, Artificial Sequence
  primer
ggaactccctgagcaaacaac

SEQ ID NO: 105344 - DNA, 38 bp, Artificial Sequence
  primer
gtaaaacgacggccagtgagctgtgcttctcctatgcc

SEQ ID NO: 105345 - DNA, 21 bp, Artificial Sequence
  primer
cagagaagctggagtgatggc

SEQ ID NO: 105346 - DNA, 21 bp, Artificial Sequence
  primer
tgacagctacacccacagacc

SEQ ID NO: 105347 - DNA, 37 bp, Artificial Sequence
  primer
gtaaaacgacggccagttcctttacggcggtagaacc

SEQ ID NO: 105348 - DNA, 38 bp, Artificial Sequence
  primer
gtaaaacgacggccagtgcaggcagttgaattgacttt

SEQ ID NO: 105349 - DNA, 21 bp, Artificial Sequence
  primer
taagagcagtgtttcatcccg

SEQ ID NO: 105350 - DNA, 19 bp, Artificial Sequence
  primer
agaagtgccagccaaggag

SEQ ID NO: 105351 - DNA, 21 bp, Artificial Sequence
  primer
gtatctgcccagctcaggaac

SEQ ID NO: 105352 - DNA, 21 bp, Artificial Sequence
  primer
tctcccgtctagctcagaacc

SEQ ID NO: 105353 - DNA, 21 bp, Artificial Sequence
  primer
agcccttaaggccactctttg

SEQ ID NO: 105354 - DNA, 21 bp, Artificial Sequence
  primer
gaggtggaaggttagagctgg

SEQ ID NO: 105355 - DNA, 21 bp, Artificial Sequence
  primer
ctcaggcctcactccataacc

SEQ ID NO: 105356 - DNA, 22 bp, Artificial Sequence
  primer
catctggtaggagcacataggc

SEQ ID NO: 105357 - DNA, 21 bp, Artificial Sequence
  primer
tttcaggaccctgagacactg

SEQ ID NO: 105358 - DNA, 21 bp, Artificial Sequence
  primer
taggttatgctggctgtcctg

SEQ ID NO: 105359 - DNA, 21 bp, Artificial Sequence
  primer
gcacccagctcataaccctac

SEQ ID NO: 105360 - DNA, 38 bp, Artificial Sequence
  primer
gtaaaacgacggccagtactgcagggagaggatgagac

SEQ ID NO: 105361 - DNA, 21 bp, Artificial Sequence
  primer
tggtctctgtcctccctgaag

SEQ ID NO: 105362 - DNA, 21 bp, Artificial Sequence
  primer
gcctcataggtcaggcagaac

SEQ ID NO: 105363 - DNA, 21 bp, Artificial Sequence
  primer
agatctcgcaggtctgctttc

SEQ ID NO: 105364 - DNA, 20 bp, Artificial Sequence
  primer
agcactccagggagcttcag

SEQ ID NO: 105365 - DNA, 38 bp, Artificial Sequence
  primer
gtaaaacgacggccagttgctctcctctaagcaaggtg

SEQ ID NO: 105366 - DNA, 21 bp, Artificial Sequence
  primer
agccaaagacacctgtgttcc

SEQ ID NO: 105367 - DNA, 18 bp, Artificial Sequence
  primer
gctgtccttggagcctgg

SEQ ID NO: 105368 - DNA, 35 bp, Artificial Sequence
  primer
gtaaaacgacggccagtaaatgccggaagtgagcc

SEQ ID NO: 105369 - DNA, 23 bp, Artificial Sequence
  primer
tgacccaatgtaagtctcagagg

SEQ ID NO: 105370 - DNA, 21 bp, Artificial Sequence
  primer
gagggacagagacccagagag

SEQ ID NO: 105371 - DNA, 20 bp, Artificial Sequence
  primer
agtcgaagtcctcgtcggag

SEQ ID NO: 105372 - DNA, 38 bp, Artificial Sequence
  primer
gtaaaacgacggccagttaactcgcaagtttagcaggc

SEQ ID NO: 105373 - DNA, 36 bp, Artificial Sequence
  primer
gtaaaacgacggccagtgcgcgtctagatccaggtc

SEQ ID NO: 105374 - DNA, 21 bp, Artificial Sequence
  primer
gtactgggcagagcataaggg

SEQ ID NO: 105375 - DNA, 21 bp, Artificial Sequence
  primer
aatggttcccagctcagtcag

SEQ ID NO: 105376 - DNA, 36 bp, Artificial Sequence
  primer
gtaaaacgacggccagtcctgcccttccacagtctc

SEQ ID NO: 105377 - DNA, 21 bp, Artificial Sequence
  primer
ctccagggtctggctgtctac

SEQ ID NO: 105378 - DNA, 21 bp, Artificial Sequence
  primer
tcttctgacactaaggcgctg

SEQ ID NO: 105379 - DNA, 21 bp, Artificial Sequence
  primer
ggatgcatatggcctgatttg

SEQ ID NO: 105380 - DNA, 38 bp, Artificial Sequence
  primer
gtaaaacgacggccagtagagaattcaagatggccgac

SEQ ID NO: 105381 - DNA, 21 bp, Artificial Sequence
  primer
gtaggtcccatcaacgtttgc

SEQ ID NO: 105382 - DNA, 21 bp, Artificial Sequence
  primer
cctccttccctgaaacctctc

SEQ ID NO: 105383 - DNA, 38 bp, Artificial Sequence
  primer
gtaaaacgacggccagtgacggaaagagtgaagggaag

SEQ ID NO: 105384 - DNA, 21 bp, Artificial Sequence
  primer
agaaacaagagggctaagggc

SEQ ID NO: 105385 - DNA, 21 bp, Artificial Sequence
  primer
cacacatctttattggcctgg

SEQ ID NO: 105386 - DNA, 39 bp, Artificial Sequence
  primer
gtaaaacgacggccagtggaaacgggttcactagaggag

SEQ ID NO: 105387 - DNA, 21 bp, Artificial Sequence
  primer
cagacattccctgaagcttgg

SEQ ID NO: 105388 - DNA, 21 bp, Artificial Sequence
  primer
ttacctcaggaagggaggatg

SEQ ID NO: 105389 - DNA, 21 bp, Artificial Sequence
  primer
gactgggtttgggtaaacgag

SEQ ID NO: 105390 - DNA, 38 bp, Artificial Sequence
  primer
gtaaaacgacggccagtcagagacagaacactgccgag

SEQ ID NO: 105391 - DNA, 21 bp, Artificial Sequence
  primer
cctcctctctgaaactggacg

SEQ ID NO: 105392 - DNA, 38 bp, Artificial Sequence
  primer
gtaaaacgacggccagtcattgctgcttctttggtcag

SEQ ID NO: 105393 - DNA, 21 bp, Artificial Sequence
  primer
atccctagtggctagtgtggc

SEQ ID NO: 105394 - DNA, 20 bp, Artificial Sequence
  primer
gattacaggcatgagccacc

SEQ ID NO: 105395 - DNA, 21 bp, Artificial Sequence
  primer
ctagtgacaggcgagacttcg

SEQ ID NO: 105396 - DNA, 38 bp, Artificial Sequence
  primer
gtaaaacgacggccagtaagacctgtagctcggtaggc

SEQ ID NO: 105397 - DNA, 38 bp, Artificial Sequence
  primer
gtaaaacgacggccagttccttctcggatggatattgc

SEQ ID NO: 105398 - DNA, 18 bp, Artificial Sequence
  primer
aggttgcagtgagctgcc

SEQ ID NO: 105399 - DNA, 38 bp, Artificial Sequence
  primer
gtaaaacgacggccagttctgctctgtgtgtgtggatg

SEQ ID NO: 105400 - DNA, 18 bp, Artificial Sequence
  primer
cccttggcaacaagagca

SEQ ID NO: 105401 - DNA, 22 bp, Artificial Sequence
  primer
tctaagaggagccttccatctg

SEQ ID NO: 105402 - DNA, 36 bp, Artificial Sequence
  primer
gtaaaacgacggccagtaaatgcctgagcaccaagg

SEQ ID NO: 105403 - DNA, 38 bp, Artificial Sequence
  primer
gtaaaacgacggccagttcccaaatcaaaggaagttcg

SEQ ID NO: 105404 - DNA, 22 bp, Artificial Sequence
  primer
ttggaatcaaacaaagaaaggg

SEQ ID NO: 105405 - DNA, 38 bp, Artificial Sequence
  primer
gtaaaacgacggccagttatggctttgcttaaggtcgg

SEQ ID NO: 105406 - DNA, 23 bp, Artificial Sequence
  primer
cacatcatccatacctttcatcc

SEQ ID NO: 105407 - DNA, 23 bp, Artificial Sequence
  primer
gggaaattgtttgctttcatctc

SEQ ID NO: 105408 - DNA, 22 bp, Artificial Sequence
  primer
tgtgacacaaagagcacagacc

SEQ ID NO: 105409 - DNA, 22 bp, Artificial Sequence
  primer
cagaagagctgcatgaatgttg

SEQ ID NO: 105410 - DNA, 39 bp, Artificial Sequence
  primer
gtaaaacgacggccagtaaacagatgtttcctcactccc

SEQ ID NO: 105411 - DNA, 36 bp, Artificial Sequence
  primer
gtaaaacgacggccagtgcgtgttagggagggatcg

SEQ ID NO: 105412 - DNA, 21 bp, Artificial Sequence
  primer
agctgagcctaaggttgctcc

SEQ ID NO: 105413 - DNA, 21 bp, Artificial Sequence
  primer
gacacaggacatggtggtcag

SEQ ID NO: 105414 - DNA, 38 bp, Artificial Sequence
  primer
gtaaaacgacggccagtgaggtggagagagatcatcgg

SEQ ID NO: 105415 - DNA, 38 bp, Artificial Sequence
  primer
gtaaaacgacggccagtctcttgacaacaagccacacc

SEQ ID NO: 105416 - DNA, 21 bp, Artificial Sequence
  primer
tggtggaggttgagtttatgg

SEQ ID NO: 105417 - DNA, 38 bp, Artificial Sequence
  primer
gtaaaacgacggccagtgaaggctgagacatcaggagg

SEQ ID NO: 105418 - DNA, 38 bp, Artificial Sequence
  primer
gtaaaacgacggccagtatcaggagcagaagcaactcc

SEQ ID NO: 105419 - DNA, 21 bp, Artificial Sequence
  primer
aggcttgttcaagtcgagcag

SEQ ID NO: 105420 - DNA, 21 bp, Artificial Sequence
  primer
tcatccacttgattactgccc

SEQ ID NO: 105421 - DNA, 38 bp, Artificial Sequence
  primer
gtaaaacgacggccagtgggacacttcagagtgggaac

SEQ ID NO: 105422 - DNA, 39 bp, Artificial Sequence
  primer
gtaaaacgacggccagttgtgtgcttccaagacaatctg

SEQ ID NO: 105423 - DNA, 38 bp, Artificial Sequence
  primer
gtaaaacgacggccagtgtcagcagacgccaataatcc

SEQ ID NO: 105424 - DNA, 21 bp, Artificial Sequence
  primer
gtgcccggtagctttaatgag

SEQ ID NO: 105425 - DNA, 38 bp, Artificial Sequence
  primer
gtaaaacgacggccagtgcaccatggatcggaatagac

SEQ ID NO: 105426 - DNA, 21 bp, Artificial Sequence
  primer
cctgatccaagctcaaggaac

SEQ ID NO: 105427 - DNA, 38 bp, Artificial Sequence
  primer
gtaaaacgacggccagttgcaacttccagacctgtgtc

SEQ ID NO: 105428 - DNA, 21 bp, Artificial Sequence
  primer
gggaaagggtctctgtccatc

SEQ ID NO: 105429 - DNA, 20 bp, Artificial Sequence
  primer
tttatttgtcttggctgggc

SEQ ID NO: 105430 - DNA, 21 bp, Artificial Sequence
  primer
tggtcacctgaacccagaatc

SEQ ID NO: 105431 - DNA, 21 bp, Artificial Sequence
  primer
tgagtggttcacagagccaac

SEQ ID NO: 105432 - DNA, 37 bp, Artificial Sequence
  primer
gtaaaacgacggccagtggccagacatactctggagc

SEQ ID NO: 105433 - DNA, 22 bp, Artificial Sequence
  primer
tgtgctatcctctgcaaatacc

SEQ ID NO: 105434 - DNA, 22 bp, Artificial Sequence
  primer
gacagtagtgacaccaggaggg

SEQ ID NO: 105435 - DNA, 21 bp, Artificial Sequence
  primer
ttccatcccatactttcagcc

SEQ ID NO: 105436 - DNA, 20 bp, Artificial Sequence
  primer
catcctgtgaaagggacagc

SEQ ID NO: 105437 - DNA, 23 bp, Artificial Sequence
  primer
aggaaacaacagtgagtgagtcc

SEQ ID NO: 105438 - DNA, 39 bp, Artificial Sequence
  primer
gtaaaacgacggccagtgacctactggaagaaagctccc

SEQ ID NO: 105439 - DNA, 21 bp, Artificial Sequence
  primer
ctcttggtcctccttgaccac

SEQ ID NO: 105440 - DNA, 38 bp, Artificial Sequence
  primer
gtaaaacgacggccagtcttccagtgtggctcttggtc

SEQ ID NO: 105441 - DNA, 35 bp, Artificial Sequence
  primer
gtaaaacgacggccagtccaccaacttgtgcaccc

SEQ ID NO: 105442 - DNA, 38 bp, Artificial Sequence
  primer
gtaaaacgacggccagttctcctagagaggcaggaacg

SEQ ID NO: 105443 - DNA, 21 bp, Artificial Sequence
  primer
agacaggtaactgaggcaggg

SEQ ID NO: 105444 - DNA, 21 bp, Artificial Sequence
  primer
aggagctttgccttcactgag

SEQ ID NO: 105445 - DNA, 21 bp, Artificial Sequence
  primer
agcagcagaccgtggagttac

SEQ ID NO: 105446 - DNA, 21 bp, Artificial Sequence
  primer
aaaggagcatgtgtgtatggg

SEQ ID NO: 105447 - DNA, 21 bp, Artificial Sequence
  primer
ccaaatgctgtaaggagacgc

SEQ ID NO: 105448 - DNA, 38 bp, Artificial Sequence
  primer
gtaaaacgacggccagtctagtacttgagcagccagcg

SEQ ID NO: 105449 - DNA, 37 bp, Artificial Sequence
  primer
gtaaaacgacggccagtgctttgtgggatgtctgtgg

SEQ ID NO: 105450 - DNA, 20 bp, Artificial Sequence
  primer
cagaaggatcctacacccgc

SEQ ID NO: 105451 - DNA, 39 bp, Artificial Sequence
  primer
gtaaaacgacggccagtctcatatgtattgcaccttggc

SEQ ID NO: 105452 - DNA, 38 bp, Artificial Sequence
  primer
gtaaaacgacggccagtcctttgctcatttcagtcagg

SEQ ID NO: 105453 - DNA, 38 bp, Artificial Sequence
  primer
gtaaaacgacggccagtcgtgtgaaggacagattgcac

SEQ ID NO: 105454 - DNA, 38 bp, Artificial Sequence
  primer
gtaaaacgacggccagtaacgaacagaaatcactggca

SEQ ID NO: 105455 - DNA, 38 bp, Artificial Sequence
  primer
gtaaaacgacggccagttggtttccagcaaggatacag

SEQ ID NO: 105456 - DNA, 38 bp, Artificial Sequence
  primer
gtaaaacgacggccagttttaagccacaccaaatctcc

SEQ ID NO: 105457 - DNA, 21 bp, Artificial Sequence
  primer
aagaatcacattgagggaggc

SEQ ID NO: 105458 - DNA, 38 bp, Artificial Sequence
  primer
gtaaaacgacggccagttccattgtggcaaatgcatac

SEQ ID NO: 105459 - DNA, 38 bp, Artificial Sequence
  primer
gtaaaacgacggccagtctaggtgaaggcggaagtttg

SEQ ID NO: 105460 - DNA, 21 bp, Artificial Sequence
  primer
ttactttcccaccctcctcac

SEQ ID NO: 105461 - DNA, 21 bp, Artificial Sequence
  primer
gacccaagaagtcatcacagg

SEQ ID NO: 105462 - DNA, 39 bp, Artificial Sequence
  primer
gtaaaacgacggccagttctccctggattcttcttctcc

SEQ ID NO: 105463 - DNA, 22 bp, Artificial Sequence
  primer
caaacagcgggacaaacaatag

SEQ ID NO: 105464 - DNA, 38 bp, Artificial Sequence
  primer
gtaaaacgacggccagtagattcaaacataccttggcg

SEQ ID NO: 105465 - DNA, 38 bp, Artificial Sequence
  primer
gtaaaacgacggccagtagttcaagctatctgccagcc

SEQ ID NO: 105466 - DNA, 20 bp, Artificial Sequence
  primer
gaacatgttgccctcctctg

SEQ ID NO: 105467 - DNA, 21 bp, Artificial Sequence
  primer
gaccatgaagcatctgactcc

SEQ ID NO: 105468 - DNA, 19 bp, Artificial Sequence
  primer
cattggtctggcactgcac

SEQ ID NO: 105469 - DNA, 44 bp, Artificial Sequence
  primer
gtaaaacgacggccagtgatgagagaataagccattactttgag

SEQ ID NO: 105470 - DNA, 20 bp, Artificial Sequence
  primer
agttggcccaggaagtcatc

SEQ ID NO: 105471 - DNA, 21 bp, Artificial Sequence
  primer
ggtgccacttagtccctaccc

SEQ ID NO: 105472 - DNA, 36 bp, Artificial Sequence
  primer
gtaaaacgacggccagtacaacaggtgatgccatgc

SEQ ID NO: 105473 - DNA, 40 bp, Artificial Sequence
  primer
gtaaaacgacggccagttctctgacagttacagcaaagcc

SEQ ID NO: 105474 - DNA, 21 bp, Artificial Sequence
  primer
aagaaagcagttgccgagaag

SEQ ID NO: 105475 - DNA, 39 bp, Artificial Sequence
  primer
gtaaaacgacggccagtttgatgccaatatggatgaatg

SEQ ID NO: 105476 - DNA, 21 bp, Artificial Sequence
  primer
gcatatgacgatgccagtttc

SEQ ID NO: 105477 - DNA, 20 bp, Artificial Sequence
  primer
tcaccatacctggccaaatg

SEQ ID NO: 105478 - DNA, 42 bp, Artificial Sequence
  primer
gtaaaacgacggccagtttggtatcaatgacctacctagtgc

SEQ ID NO: 105479 - DNA, 38 bp, Artificial Sequence
  primer
gtaaaacgacggccagtaagtgcacatgtctgcgtctc

SEQ ID NO: 105480 - DNA, 19 bp, Artificial Sequence
  primer
ggtccctcaaagctagcgg

SEQ ID NO: 105481 - DNA, 21 bp, Artificial Sequence
  primer
cacaggttggtagtcgtgtcg

SEQ ID NO: 105482 - DNA, 38 bp, Artificial Sequence
  primer
gtaaaacgacggccagtttgtttccttcttccaccctc

SEQ ID NO: 105483 - DNA, 38 bp, Artificial Sequence
  primer
gtaaaacgacggccagtccaaagatgagaaatgcatgg

SEQ ID NO: 105484 - DNA, 38 bp, Artificial Sequence
  primer
gtaaaacgacggccagttctgcaggtttcacagtccac

SEQ ID NO: 105485 - DNA, 38 bp, Artificial Sequence
  primer
gtaaaacgacggccagtaaggatgctttggtgaagcac

SEQ ID NO: 105486 - DNA, 21 bp, Artificial Sequence
  primer
ggacaaggccctacctaaagc

SEQ ID NO: 105487 - DNA, 21 bp, Artificial Sequence
  primer
ttcctgtagcttcacacgctg

SEQ ID NO: 105488 - DNA, 21 bp, Artificial Sequence
  primer
tgacaggcaagcacctatgag

SEQ ID NO: 105489 - DNA, 22 bp, Artificial Sequence
  primer
tgtgcaaccataactattggca

SEQ ID NO: 105490 - DNA, 21 bp, Artificial Sequence
  primer
ctggtatttcaggatcccagg

SEQ ID NO: 105491 - DNA, 37 bp, Artificial Sequence
  primer
gtaaaacgacggccagtcttgcctctttccatgatgc

SEQ ID NO: 105492 - DNA, 21 bp, Artificial Sequence
  primer
cctctaaaggatgccaccaag

SEQ ID NO: 105493 - DNA, 22 bp, Artificial Sequence
  primer
tctaacctccaatgagggagac

SEQ ID NO: 105494 - DNA, 39 bp, Artificial Sequence
  primer
gtaaaacgacggccagtttaggcagaatgtcaagtgcag

SEQ ID NO: 105495 - DNA, 25 bp, Artificial Sequence
  primer
cagacagttaattcatttctttggc

SEQ ID NO: 105496 - DNA, 19 bp, Artificial Sequence
  primer
tctccacgctgagggaaac

SEQ ID NO: 105497 - DNA, 21 bp, Artificial Sequence
  primer
gaccaaatcaagccaaacacc

SEQ ID NO: 105498 - DNA, 22 bp, Artificial Sequence
  primer
caaagtatttgcagtcgttccc

SEQ ID NO: 105499 - DNA, 26 bp, Artificial Sequence
  primer
tgaagacttgtgcaatagtaagaagc

SEQ ID NO: 105500 - DNA, 38 bp, Artificial Sequence
  primer
gtaaaacgacggccagtcctctagagcctttgcttccc

SEQ ID NO: 105501 - DNA, 38 bp, Artificial Sequence
  primer
gtaaaacgacggccagtgaaggaatgtcaaggtccagc

SEQ ID NO: 105502 - DNA, 21 bp, Artificial Sequence
  primer
gggcaacaaccctagagagag

SEQ ID NO: 105503 - DNA, 21 bp, Artificial Sequence
  primer
cccactcacagacctcacttc

SEQ ID NO: 105504 - DNA, 38 bp, Artificial Sequence
  primer
gtaaaacgacggccagtctagaggctgtcagggaggac

SEQ ID NO: 105505 - DNA, 21 bp, Artificial Sequence
  primer
ggtagacatctgaaatcgccc

SEQ ID NO: 105506 - DNA, 21 bp, Artificial Sequence
  primer
aagccgctcactgaagtcaag

SEQ ID NO: 105507 - DNA, 38 bp, Artificial Sequence
  primer
gtaaaacgacggccagtgcctttccttgagagaagcag

SEQ ID NO: 105508 - DNA, 21 bp, Artificial Sequence
  primer
tgtctccatgagaggaattgg

SEQ ID NO: 105509 - DNA, 21 bp, Artificial Sequence
  primer
ctaggaggctggagtttgtgg

SEQ ID NO: 105510 - DNA, 21 bp, Artificial Sequence
  primer
agggtcattgtgggagaaatg

SEQ ID NO: 105511 - DNA, 21 bp, Artificial Sequence
  primer
agcatcaactccactgctctg

SEQ ID NO: 105512 - DNA, 21 bp, Artificial Sequence
  primer
tcatctacagcaagcaaaggg

SEQ ID NO: 105513 - DNA, 21 bp, Artificial Sequence
  primer
aataaggccgactccaaatcc

SEQ ID NO: 105514 - DNA, 21 bp, Artificial Sequence
  primer
tagagctcgcaggtagttccc

SEQ ID NO: 105515 - DNA, 37 bp, Artificial Sequence
  primer
gtaaaacgacggccagtcttcgtcccagcctaacctc

SEQ ID NO: 105516 - DNA, 21 bp, Artificial Sequence
  primer
cccactcacagacctcacttc

SEQ ID NO: 105517 - DNA, 42 bp, Artificial Sequence
  primer
gtaaaacgacggccagtcagctgcagaagagtagtggagtag

SEQ ID NO: 105518 - DNA, 38 bp, Artificial Sequence
  primer
gtaaaacgacggccagtcctttccagctcctgttcatc

SEQ ID NO: 105519 - DNA, 21 bp, Artificial Sequence
  primer
gaagtgtgaaagctgaggctg

SEQ ID NO: 105520 - DNA, 38 bp, Artificial Sequence
  primer
gtaaaacgacggccagttggaattaaagcagcagcaag

SEQ ID NO: 105521 - DNA, 21 bp, Artificial Sequence
  primer
ggatctctaccagcttctccg

SEQ ID NO: 105522 - DNA, 21 bp, Artificial Sequence
  primer
tgtacacaccctgcaaggaag

SEQ ID NO: 105523 - DNA, 21 bp, Artificial Sequence
  primer
tttaatccagggcaaatggtg

SEQ ID NO: 105524 - DNA, 22 bp, Artificial Sequence
  primer
tgccaaactatggagcactagg

SEQ ID NO: 105525 - DNA, 21 bp, Artificial Sequence
  primer
caggagaaagcgggatttagg

SEQ ID NO: 105526 - DNA, 20 bp, Artificial Sequence
  primer
agggataagggagagagccc

SEQ ID NO: 105527 - DNA, 38 bp, Artificial Sequence
  primer
gtaaaacgacggccagtgttcttgagtctcctgcaccc

SEQ ID NO: 105528 - DNA, 37 bp, Artificial Sequence
  primer
gtaaaacgacggccagtgggagcgctatcctagaagg

SEQ ID NO: 105529 - DNA, 20 bp, Artificial Sequence
  primer
ctgggcaacagagcaagact

SEQ ID NO: 105530 - DNA, 22 bp, Artificial Sequence
  primer
aaccacctgctctgagtgaaag

SEQ ID NO: 105531 - DNA, 19 bp, Artificial Sequence
  primer
tgtgcagaaggccttggag

SEQ ID NO: 105532 - DNA, 19 bp, Artificial Sequence
  primer
gtgctggccctagctaccc

SEQ ID NO: 105533 - DNA, 21 bp, Artificial Sequence
  primer
cacacctgtgctctcagcttc

SEQ ID NO: 105534 - DNA, 21 bp, Artificial Sequence
  primer
atccgactgcatctgtaaggg

SEQ ID NO: 105535 - DNA, 38 bp, Artificial Sequence
  primer
gtaaaacgacggccagtagagggaagaagccctgtgtc

SEQ ID NO: 105536 - DNA, 38 bp, Artificial Sequence
  primer
gtaaaacgacggccagttaggccatggaaataagcacc

SEQ ID NO: 105537 - DNA, 21 bp, Artificial Sequence
  primer
gagccaagggcttagatgttc

SEQ ID NO: 105538 - DNA, 20 bp, Artificial Sequence
  primer
ggagtccagcgtgatctcag

SEQ ID NO: 105539 - DNA, 22 bp, Artificial Sequence
  primer
aagccactgcacagtctaggag

SEQ ID NO: 105540 - DNA, 21 bp, Artificial Sequence
  primer
caggaagtgtggcaaacattg

SEQ ID NO: 105541 - DNA, 21 bp, Artificial Sequence
  primer
agccaacagtcctagtgggag

SEQ ID NO: 105542 - DNA, 20 bp, Artificial Sequence
  primer
agtgtggacgtgctgtctcc

SEQ ID NO: 105543 - DNA, 21 bp, Artificial Sequence
  primer
ctgttcagaccatcttctggg

SEQ ID NO: 105544 - DNA, 38 bp, Artificial Sequence
  primer
gtaaaacgacggccagtttaatcccgcttctgaccttg

SEQ ID NO: 105545 - DNA, 20 bp, Artificial Sequence
  primer
gccaagtgccagacacagag

SEQ ID NO: 105546 - DNA, 39 bp, Artificial Sequence
  primer
gtaaaacgacggccagtgggcagaaagataaacagggtc

SEQ ID NO: 105547 - DNA, 38 bp, Artificial Sequence
  primer
gtaaaacgacggccagtctttagttgggatgggacagg

SEQ ID NO: 105548 - DNA, 38 bp, Artificial Sequence
  primer
gtaaaacgacggccagtgaggtccttggatcacccttc

SEQ ID NO: 105549 - DNA, 38 bp, Artificial Sequence
  primer
gtaaaacgacggccagtaccctacaggtggagttgagg

SEQ ID NO: 105550 - DNA, 21 bp, Artificial Sequence
  primer
tttacaagctaggaggctggg

SEQ ID NO: 105551 - DNA, 21 bp, Artificial Sequence
  primer
catatctggctggcttccttg

SEQ ID NO: 105552 - DNA, 20 bp, Artificial Sequence
  primer
tcacggtgatatccaggtcc

SEQ ID NO: 105553 - DNA, 21 bp, Artificial Sequence
  primer
gtagatcctggtgggaaatgg

SEQ ID NO: 105554 - DNA, 21 bp, Artificial Sequence
  primer
cagagctagattcacggctcc

SEQ ID NO: 105555 - DNA, 19 bp, Artificial Sequence
  primer
ggctattcagcctggctcc

SEQ ID NO: 105556 - DNA, 21 bp, Artificial Sequence
  primer
cctgtgtaggccacatcaaac

SEQ ID NO: 105557 - DNA, 25 bp, Artificial Sequence
  primer
cagacaaagtgcttctgatatgttt

SEQ ID NO: 105558 - DNA, 24 bp, Artificial Sequence
  primer
tgttcacattgactggtatcactg

SEQ ID NO: 105559 - DNA, 38 bp, Artificial Sequence
  primer
gtaaaacgacggccagtacttccaagtcgcagtgtctg

SEQ ID NO: 105560 - DNA, 37 bp, Artificial Sequence
  primer
gtaaaacgacggccagtatgtcacctctgcttctgcc

SEQ ID NO: 105561 - DNA, 21 bp, Artificial Sequence
  primer
ttaagccgagaacgtgagagc

SEQ ID NO: 105562 - DNA, 21 bp, Artificial Sequence
  primer
ttatgatcattgggcagcttg

SEQ ID NO: 105563 - DNA, 36 bp, Artificial Sequence
  primer
gtaaaacgacggccagtctttgcaccacagcagcag

SEQ ID NO: 105564 - DNA, 21 bp, Artificial Sequence
  primer
ggaagtgagggatgcatgttc

SEQ ID NO: 105565 - DNA, 21 bp, Artificial Sequence
  primer
cagctccagcttcacaaacac

SEQ ID NO: 105566 - DNA, 21 bp, Artificial Sequence
  primer
ggctttcacaccaatcctttc

SEQ ID NO: 105567 - DNA, 38 bp, Artificial Sequence
  primer
gtaaaacgacggccagtcaaccagcagcagaagtcttg

SEQ ID NO: 105568 - DNA, 38 bp, Artificial Sequence
  primer
gtaaaacgacggccagttgcattgtttgttggatttgg

SEQ ID NO: 105569 - DNA, 38 bp, Artificial Sequence
  primer
gtaaaacgacggccagttcaaggcctcatttctatggc

SEQ ID NO: 105570 - DNA, 21 bp, Artificial Sequence
  primer
ccatttcctatccagacagcc

SEQ ID NO: 105571 - DNA, 38 bp, Artificial Sequence
  primer
gtaaaacgacggccagtccttgcaggccctttatattg

SEQ ID NO: 105572 - DNA, 21 bp, Artificial Sequence
  primer
ccatttgcacactggtgactc

SEQ ID NO: 105573 - DNA, 20 bp, Artificial Sequence
  primer
tgactaatgcaggtggctcc

SEQ ID NO: 105574 - DNA, 38 bp, Artificial Sequence
  primer
gtaaaacgacggccagtcagaagctaccagtgtcaccc

SEQ ID NO: 105575 - DNA, 42 bp, Artificial Sequence
  primer
gtaaaacgacggccagttgtctgaacctctatttcagcatag

SEQ ID NO: 105576 - DNA, 21 bp, Artificial Sequence
  primer
tcaacaactggctcgtcattc

SEQ ID NO: 105577 - DNA, 22 bp, Artificial Sequence
  primer
tcccagttgcagattaacattg

SEQ ID NO: 105578 - DNA, 38 bp, Artificial Sequence
  primer
gtaaaacgacggccagtctcagaacacactcacctccg

SEQ ID NO: 105579 - DNA, 39 bp, Artificial Sequence
  primer
gtaaaacgacggccagttgaagccatgatgcttacactc

SEQ ID NO: 105580 - DNA, 18 bp, Artificial Sequence
  primer
cagtgcgtgccctcgtag

SEQ ID NO: 105581 - DNA, 21 bp, Artificial Sequence
  primer
gcaatcacacacacactctgg

SEQ ID NO: 105582 - DNA, 21 bp, Artificial Sequence
  primer
tccaagagagagggcagactc

SEQ ID NO: 105583 - DNA, 38 bp, Artificial Sequence
  primer
gtaaaacgacggccagtacctcctccctgatctccttg

SEQ ID NO: 105584 - DNA, 21 bp, Artificial Sequence
  primer
gtggcagacgtaactgtggac

SEQ ID NO: 105585 - DNA, 38 bp, Artificial Sequence
  primer
gtaaaacgacggccagttagctccagggtcgctagatg

SEQ ID NO: 105586 - DNA, 21 bp, Artificial Sequence
  primer
acagatccacacaggaccctc

SEQ ID NO: 105587 - DNA, 38 bp, Artificial Sequence
  primer
gtaaaacgacggccagtagagaaggtgccaggtgtgag

SEQ ID NO: 105588 - DNA, 38 bp, Artificial Sequence
  primer
gtaaaacgacggccagttgagttatccagtggcagagg

SEQ ID NO: 105589 - DNA, 21 bp, Artificial Sequence
  primer
aggtcacttcacctcctgagc

SEQ ID NO: 105590 - DNA, 21 bp, Artificial Sequence
  primer
ccaccagtatcctacaagccc

SEQ ID NO: 105591 - DNA, 18 bp, Artificial Sequence
  primer
gcaggaagcccaggtcac

SEQ ID NO: 105592 - DNA, 21 bp, Artificial Sequence
  primer
cccaattcttgaccctctctg

SEQ ID NO: 105593 - DNA, 21 bp, Artificial Sequence
  primer
gcccacacatctgacagctac

SEQ ID NO: 105594 - DNA, 37 bp, Artificial Sequence
  primer
gtaaaacgacggccagtccatcagaggctggtgtctc

SEQ ID NO: 105595 - DNA, 38 bp, Artificial Sequence
  primer
gtaaaacgacggccagttaagcactgggtggatctgac

SEQ ID NO: 105596 - DNA, 37 bp, Artificial Sequence; identical to SEQ ID NO: 105594
  primer

SEQ ID NO: 105597 - DNA, 38 bp, Artificial Sequence
  primer
gtaaaacgacggccagtgcaacagagcagcgaagaaag

SEQ ID NO: 105598 - DNA, 38 bp, Artificial Sequence
  primer
gtaaaacgacggccagtatagcccatgtcctcatccac

SEQ ID NO: 105599 - DNA, 38 bp, Artificial Sequence
  primer
gtaaaacgacggccagttttggcttcaacactgaccac

SEQ ID NO: 105600 - DNA, 39 bp, Artificial Sequence
  primer
gtaaaacgacggccagtgttggaaaccactgggctatac

SEQ ID NO: 105601 - DNA, 21 bp, Artificial Sequence
  primer
aaggtggctgggtaatgaatc

SEQ ID NO: 105602 - DNA, 22 bp, Artificial Sequence
  primer
ggtgtgagccaccactcttaac

SEQ ID NO: 105603 - DNA, 21 bp, Artificial Sequence
  primer
gccacttcctgcaatttgaac

SEQ ID NO: 105604 - DNA, 21 bp, Artificial Sequence
  primer
tatacagagctccattggccc

SEQ ID NO: 105605 - DNA, 39 bp, Artificial Sequence
  primer
gtaaaacgacggccagtgtacccaatctggaagatggtc

SEQ ID NO: 105606 - DNA, 20 bp, Artificial Sequence
  primer
agcagctgggagtacagacc

SEQ ID NO: 105607 - DNA, 39 bp, Artificial Sequence
  primer
gtaaaacgacggccagtcagaggcaataatttccaaagc

SEQ ID NO: 105608 - DNA, 23 bp, Artificial Sequence
  primer
tgagagcaccatttacccataag

SEQ ID NO: 105609 - DNA, 26 bp, Artificial Sequence
  primer
cagatgcagcatattcctatactgtg

SEQ ID NO: 105610 - DNA, 41 bp, Artificial Sequence
  primer
gtaaaacgacggccagtcgtgaacaactaactggtcttctg

SEQ ID NO: 105611 - DNA, 24 bp, Artificial Sequence
  primer
tgagaagacttggcacttgtattg

SEQ ID NO: 105612 - DNA, 21 bp, Artificial Sequence
  primer
tgaatggtggtttgcaatatg

SEQ ID NO: 105613 - DNA, 23 bp, Artificial Sequence
  primer
gcaagatccattaattctgctgg

SEQ ID NO: 105614 - DNA, 39 bp, Artificial Sequence
  primer
gtaaaacgacggccagtttctgtagttgctttcaggcag

SEQ ID NO: 105615 - DNA, 38 bp, Artificial Sequence
  primer
gtaaaacgacggccagtaagcaacagactaagggctgg

SEQ ID NO: 105616 - DNA, 21 bp, Artificial Sequence
  primer
acaggccttgaccttatcacc

SEQ ID NO: 105617 - DNA, 21 bp, Artificial Sequence
  primer
tatgctgtggagtcatctggg

SEQ ID NO: 105618 - DNA, 21 bp, Artificial Sequence
  primer
gggtaacaagaaagtggacgg

SEQ ID NO: 105619 - DNA, 21 bp, Artificial Sequence
  primer
ccttgcatctggcatattgtg

SEQ ID NO: 105620 - DNA, 21 bp, Artificial Sequence
  primer
agctccatattctgggctgtg

SEQ ID NO: 105621 - DNA, 38 bp, Artificial Sequence
  primer
gtaaaacgacggccagtgggagcttcttggaatcagag

SEQ ID NO: 105622 - DNA, 38 bp, Artificial Sequence
  primer
gtaaaacgacggccagtgtacaaggaggaggcagaagg

SEQ ID NO: 105623 - DNA, 20 bp, Artificial Sequence
  primer
agctccagctggtaagggtc

SEQ ID NO: 105624 - DNA, 20 bp, Artificial Sequence
  primer
gtgtttgagccctcagtcgt

SEQ ID NO: 105625 - DNA, 21 bp, Artificial Sequence
  primer
aaggtggaggccagtgtattc

SEQ ID NO: 105626 - DNA, 20 bp, Artificial Sequence
  primer
gctgcaggcacactctcttg

SEQ ID NO: 105627 - DNA, 38 bp, Artificial Sequence
  primer
gtaaaacgacggccagtgtcttcctgttcacagagccc

SEQ ID NO: 105628 - DNA, 20 bp, Artificial Sequence
  primer
atggagggacagtgggtagg

SEQ ID NO: 105629 - DNA, 38 bp, Artificial Sequence
  primer
gtaaaacgacggccagtttagaactcccatctgccagg

SEQ ID NO: 105630 - DNA, 21 bp, Artificial Sequence
  primer
tgccacatattcacttcctgg

SEQ ID NO: 105631 - DNA, 38 bp, Artificial Sequence
  primer
gtaaaacgacggccagtagactcacaacagctcctcgg

SEQ ID NO: 105632 - DNA, 20 bp, Artificial Sequence
  primer
aggatgtaagtggcccaagg

SEQ ID NO: 105633 - DNA, 21 bp, Artificial Sequence
  primer
accgatccttaaagctctgcc

SEQ ID NO: 105634 - DNA, 38 bp, Artificial Sequence
  primer
gtaaaacgacggccagtcttatgtctggcttctgcctg

SEQ ID NO: 105635 - DNA, 21 bp, Artificial Sequence
  primer
agcaggaaccctcttaccctc

SEQ ID NO: 105636 - DNA, 38 bp, Artificial Sequence
  primer
gtaaaacgacggccagtaatgagaacagagtggtcggc

SEQ ID NO: 105637 - DNA, 21 bp, Artificial Sequence
  primer
ctcttgattctgaccatgccc

SEQ ID NO: 105638 - DNA, 20 bp, Artificial Sequence
  primer
aagcacaaggccgtacacac

SEQ ID NO: 105639 - DNA, 21 bp, Artificial Sequence
  primer
ggaagttggcaccaaatcaac

SEQ ID NO: 105640 - DNA, 21 bp, Artificial Sequence
  primer
tctctcgccatattccctctc

SEQ ID NO: 105641 - DNA, 37 bp, Artificial Sequence
  primer
gtaaaacgacggccagtccttgagtggtcctgctctg

SEQ ID NO: 105642 - DNA, 21 bp, Artificial Sequence
  primer
aaatgtatcatcgtgggcacc

SEQ ID NO: 105643 - DNA, 38 bp, Artificial Sequence
  primer
gtaaaacgacggccagtaataaccactaggtggcaggc

SEQ ID NO: 105644 - DNA, 20 bp, Artificial Sequence
  primer
atgcgtgtgtgtgtagcagg

SEQ ID NO: 105645 - DNA, 38 bp, Artificial Sequence
  primer
gtaaaacgacggccagtctcctacagcacagcacttgg

SEQ ID NO: 105646 - DNA, 38 bp, Artificial Sequence
  primer
gtaaaacgacggccagtttgcctcttcaaagggagaag

SEQ ID NO: 105647 - DNA, 38 bp, Artificial Sequence
  primer
gtaaaacgacggccagtctgaaccaggcctatggagag

SEQ ID NO: 105648 - DNA, 21 bp, Artificial Sequence
  primer
gaagatccagtggcaaagagg

SEQ ID NO: 105649 - DNA, 38 bp, Artificial Sequence
  primer
gtaaaacgacggccagtctggaagaaagacaagggcag

SEQ ID NO: 105650 - DNA, 21 bp, Artificial Sequence
  primer
tgctacccgctaaatgatgtg

SEQ ID NO: 105651 - DNA, 38 bp, Artificial Sequence
  primer
gtaaaacgacggccagtggcctccatttcctcacttac

SEQ ID NO: 105652 - DNA, 38 bp, Artificial Sequence
  primer
gtaaaacgacggccagtaattccacgcctttctgtgac

SEQ ID NO: 105653 - DNA, 22 bp, Artificial Sequence
  primer
ccagcctcagtgacagagaaag

SEQ ID NO: 105654 - DNA, 21 bp, Artificial Sequence
  primer
gccttagccacatctccttct

SEQ ID NO: 105655 - DNA, 21 bp, Artificial Sequence
  primer
tccctatgtcattctgccatc

SEQ ID NO: 105656 - DNA, 39 bp, Artificial Sequence
  primer
gtaaaacgacggccagtactggatcatacttgagctggg

SEQ ID NO: 105657 - DNA, 20 bp, Artificial Sequence
  primer
gtcctatgctcccttccctg

SEQ ID NO: 105658 - DNA, 35 bp, Artificial Sequence
  primer
gtaaaacgacggccagtgtcttggcctcacgtccc

SEQ ID NO: 105659 - DNA, 21 bp, Artificial Sequence
  primer
gtctccaagtgggagctgaag

SEQ ID NO: 105660 - DNA, 38 bp, Artificial Sequence
  primer
gtaaaacgacggccagtagtggcacaggttgggtaaac

SEQ ID NO: 105661 - DNA, 21 bp, Artificial Sequence
  primer
atgtctccttggtcttcaggc

SEQ ID NO: 105662 - DNA, 38 bp, Artificial Sequence
  primer
gtaaaacgacggccagtctcctgaccttcttgaggacc

SEQ ID NO: 105663 - DNA, 38 bp, Artificial Sequence
  primer
gtaaaacgacggccagtcagcaacctgagtcccttacc

SEQ ID NO: 105664 - DNA, 21 bp, Artificial Sequence
  primer
gctgggaaaggaggaatgaag

SEQ ID NO: 105665 - DNA, 22 bp, Artificial Sequence
  primer
aagaggaacagatgaagggagc

SEQ ID NO: 105666 - DNA, 38 bp, Artificial Sequence
  primer
gtaaaacgacggccagtgggagaccctagacaggacag

SEQ ID NO: 105667 - DNA, 21 bp, Artificial Sequence
  primer
agtgggaagcaaagccataag

SEQ ID NO: 105668 - DNA, 21 bp, Artificial Sequence
  primer
tggtaaagaaggaaagcccag

SEQ ID NO: 105669 - DNA, 26 bp, Artificial Sequence
  primer
tctaaactccatttctgaattccatc

SEQ ID NO: 105670 - DNA, 21 bp, Artificial Sequence
  primer
tggtaaagaaggaaagcccag

SEQ ID NO: 105671 - DNA, 38 bp, Artificial Sequence
  primer
gtaaaacgacggccagttgcacaatttaccagtgggac

SEQ ID NO: 105672 - DNA, 38 bp, Artificial Sequence
  primer
gtaaaacgacggccagtgcagtgccacctagtttcctc

SEQ ID NO: 105673 - DNA, 21 bp, Artificial Sequence
  primer
atctgagcaccagaaaccagg

SEQ ID NO: 105674 - DNA, 38 bp, Artificial Sequence
  primer
gtaaaacgacggccagttttcccatcagcttggatctc

SEQ ID NO: 105675 - DNA, 21 bp, Artificial Sequence
  primer
tctgcactgcctttcattcac

SEQ ID NO: 105676 - DNA, 38 bp, Artificial Sequence
  primer
gtaaaacgacggccagtcaaacaagattgctgcaaatg

SEQ ID NO: 105677 - DNA, 38 bp, Artificial Sequence
  primer
gtaaaacgacggccagtgcttaggtcaacaagtgcctg

SEQ ID NO: 105678 - DNA, 21 bp, Artificial Sequence
  primer
tggccagaaattatcaggagg

SEQ ID NO: 105679 - DNA, 39 bp, Artificial Sequence
  primer
gtaaaacgacggccagttgaggagtcttccaggtctgag

SEQ ID NO: 105680 - DNA, 18 bp, Artificial Sequence
  primer
atcggtatccgcgaccac

SEQ ID NO: 105681 - DNA, 21 bp, Artificial Sequence
  primer
ttactattgaggaggcctggg

SEQ ID NO: 105682 - DNA, 21 bp, Artificial Sequence
  primer
aaacctgcgttagggtctcag

SEQ ID NO: 105683 - DNA, 38 bp, Artificial Sequence
  primer
gtaaaacgacggccagtactttccaactgcctgacctg

SEQ ID NO: 105684 - DNA, 22 bp, Artificial Sequence
  primer
cctcacctatctctcctgttgc

SEQ ID NO: 105685 - DNA, 39 bp, Artificial Sequence
  primer
gtaaaacgacggccagttgaaccagagagctgctgtaag

SEQ ID NO: 105686 - DNA, 38 bp, Artificial Sequence
  primer
gtaaaacgacggccagtctgcccactccctacctactc

SEQ ID NO: 105687 - DNA, 21 bp, Artificial Sequence
  primer
ttgggttccatcactccattc

SEQ ID NO: 105688 - DNA, 22 bp, Artificial Sequence
  primer
aagtcaggagagccaagtgatg

SEQ ID NO: 105689 - DNA, 22 bp, Artificial Sequence
  primer
gcacgtgacttgtataggctcc

SEQ ID NO: 105690 - DNA, 38 bp, Artificial Sequence
  primer
gtaaaacgacggccagtggaagtctccttggtcagtgg

SEQ ID NO: 105691 - DNA, 21 bp, Artificial Sequence
  primer
acatcaacagcttctgcaggg

SEQ ID NO: 105692 - DNA, 27 bp, Artificial Sequence
  primer
gaaagggttagaaagaaatatacaggg

SEQ ID NO: 105693 - DNA, 22 bp, Artificial Sequence
  primer
caagtgacatgaattctgctgc

SEQ ID NO: 105694 - DNA, 22 bp, Artificial Sequence
  primer
agacatgaaatgtgcattctgg

SEQ ID NO: 105695 - DNA, 37 bp, Artificial Sequence
  primer
gtaaaacgacggccagtgtttgggtagcactgggcac

SEQ ID NO: 105696 - DNA, 38 bp, Artificial Sequence
  primer
gtaaaacgacggccagtcaagtgattctcccaccttgg

SEQ ID NO: 105697 - DNA, 37 bp, Artificial Sequence
  primer
gtaaaacgacggccagtccgaacccacattcaaacag

SEQ ID NO: 105698 - DNA, 19 bp, Artificial Sequence
  primer
cctgagtgtttctgcaggg

SEQ ID NO: 105699 - DNA, 21 bp, Artificial Sequence
  primer
agaacaatcttcaaggcaggg

SEQ ID NO: 105700 - DNA, 38 bp, Artificial Sequence
  primer
gtaaaacgacggccagtccagtatacaggcgtggtctc

SEQ ID NO: 105701 - DNA, 37 bp, Artificial Sequence
  primer
gtaaaacgacggccagtgctcaagtgattctcccacc

SEQ ID NO: 105702 - DNA, 39 bp, Artificial Sequence
  primer
gtaaaacgacggccagtggcaccggtaccttccttatag

SEQ ID NO: 105703 - DNA, 21 bp, Artificial Sequence
  primer
acccacaacccactccataag

SEQ ID NO: 105704 - DNA, 21 bp, Artificial Sequence
  primer
aagcggacaaacgcttagaac

SEQ ID NO: 105705 - DNA, 39 bp, Artificial Sequence
  primer
gtaaaacgacggccagtgaaccatgtgttgagaggaacc

SEQ ID NO: 105706 - DNA, 21 bp, Artificial Sequence
  primer
ctgcaaagtcttggaaggatg

SEQ ID NO: 105707 - DNA, 21 bp, Artificial Sequence
  primer
ggacacttaagagccctggtc

SEQ ID NO: 105708 - DNA, 21 bp, Artificial Sequence
  primer
cacctggaaagaggagctttg

SEQ ID NO: 105709 - DNA, 38 bp, Artificial Sequence
  primer
gtaaaacgacggccagtctccaactgtgctgctctcag

SEQ ID NO: 105710 - DNA, 38 bp, Artificial Sequence
  primer
gtaaaacgacggccagtaggacctaacagtcgacacgc

SEQ ID NO: 105711 - DNA, 20 bp, Artificial Sequence
  primer
acttccctcccaccacagac

SEQ ID NO: 105712 - DNA, 38 bp, Artificial Sequence
  primer
gtaaaacgacggccagtcagccaccatcaggtacagac

SEQ ID NO: 105713 - DNA, 38 bp, Artificial Sequence
  primer
gtaaaacgacggccagtcggagcttgtgtttgatgttg

SEQ ID NO: 105714 - DNA, 35 bp, Artificial Sequence
  primer
gtaaaacgacggccagtagccagctggtgacatgc

SEQ ID NO: 105715 - DNA, 19 bp, Artificial Sequence
  primer
cacctggctggtaggcttc

SEQ ID NO: 105716 - DNA, 18 bp, Artificial Sequence
  primer
ctcacctggttgggtcgg

SEQ ID NO: 105717 - DNA, 36 bp, Artificial Sequence
  primer
gtaaaacgacggccagtggtgagatgctcctgggtg

SEQ ID NO: 105718 - DNA, 21 bp, Artificial Sequence
  primer
ttgatgaaagctgccattagc

SEQ ID NO: 105719 - DNA, 36 bp, Artificial Sequence
  primer
gtaaaacgacggccagtcatggcattcaggttctgc

SEQ ID NO: 105720 - DNA, 21 bp, Artificial Sequence
  primer
ctgcctccgtaacatttctcg

SEQ ID NO: 105721 - DNA, 20 bp, Artificial Sequence
  primer
gtccttgaggctgctggaac

SEQ ID NO: 105722 - DNA, 38 bp, Artificial Sequence
  primer
gtaaaacgacggccagtgcacctggttactaagggacg

SEQ ID NO: 105723 - DNA, 37 bp, Artificial Sequence
  primer
gtaaaacgacggccagtgggagcattgcactctgttc

SEQ ID NO: 105724 - DNA, 36 bp, Artificial Sequence
  primer
gtaaaacgacggccagtatccacccttccatggctc

SEQ ID NO: 105725 - DNA, 38 bp, Artificial Sequence
  primer
gtaaaacgacggccagttgcccagacttcctctttagg

SEQ ID NO: 105726 - DNA, 38 bp, Artificial Sequence
  primer
gtaaaacgacggccagtccagatgagttatggcctgtg

SEQ ID NO: 105727 - DNA, 20 bp, Artificial Sequence
  primer
gattcctgtaccgcagcaag

SEQ ID NO: 105728 - DNA, 22 bp, Artificial Sequence
  primer
aatcatttctttgtcacccacg

SEQ ID NO: 105729 - DNA, 19 bp, Artificial Sequence
  primer
tttctccctgtcctgctgc

SEQ ID NO: 105730 - DNA, 39 bp, Artificial Sequence
  primer
gtaaaacgacggccagtgaaggagctgaagaagggaaag

SEQ ID NO: 105731 - DNA, 20 bp, Artificial Sequence
  primer
tacaggtttgggctgcagtg

SEQ ID NO: 105732 - DNA, 35 bp, Artificial Sequence
  primer
gtaaaacgacggccagtgccaccactccacgctaa

SEQ ID NO: 105733 - DNA, 21 bp, Artificial Sequence
  primer
cctcctcatcccacagttctc

SEQ ID NO: 105734 - DNA, 38 bp, Artificial Sequence
  primer
gtaaaacgacggccagtcttgagctcgctgttctaagg

SEQ ID NO: 105735 - DNA, 21 bp, Artificial Sequence
  primer
caaggacaccagaaccatttg

SEQ ID NO: 105736 - DNA, 21 bp, Artificial Sequence
  primer
ggcaagagaaagctttgggtc

SEQ ID NO: 105737 - DNA, 37 bp, Artificial Sequence
  primer
gtaaaacgacggccagttagtacacaggccagccagg

SEQ ID NO: 105738 - DNA, 21 bp, Artificial Sequence
  primer
ccttcaaacgatccctcaaac

SEQ ID NO: 105739 - DNA, 21 bp, Artificial Sequence
  primer
gcccaatgctcagtttctacc

SEQ ID NO: 105740 - DNA, 20 bp, Artificial Sequence
  primer
gcaaagatgccaacaagctc

SEQ ID NO: 105741 - DNA, 21 bp, Artificial Sequence
  primer
cttgtctccctcccaagtctc

SEQ ID NO: 105742 - DNA, 39 bp, Artificial Sequence
  primer
gtaaaacgacggccagttcagggaaatttgaaacagtcc

SEQ ID NO: 105743 - DNA, 21 bp, Artificial Sequence
  primer
ctacatagcggaggttcagcc

SEQ ID NO: 105744 - DNA, 39 bp, Artificial Sequence
  primer
gtaaaacgacggccagtcaactggacaggtgataactgg

SEQ ID NO: 105745 - DNA, 18 bp, Artificial Sequence
  primer
ccatgttgccctgtctgg

SEQ ID NO: 105746 - DNA, 38 bp, Artificial Sequence
  primer
gtaaaacgacggccagtacactcttgcccatccatctt

SEQ ID NO: 105747 - DNA, 38 bp, Artificial Sequence
  primer
gtaaaacgacggccagtagagtgaaggctcgctctgtg

SEQ ID NO: 105748 - DNA, 35 bp, Artificial Sequence
  primer
gtaaaacgacggccagttagctgggtgtggtggtg

SEQ ID NO: 105749 - DNA, 19 bp, Artificial Sequence
  primer
tgtccagggcacatgaaac

SEQ ID NO: 105750 - DNA, 20 bp, Artificial Sequence
  primer
gggacgctttccagagaaac

SEQ ID NO: 105751 - DNA, 19 bp, Artificial Sequence
  primer
gccggtaggagaacatccc

SEQ ID NO: 105752 - DNA, 40 bp, Artificial Sequence
  primer
gtaaaacgacggccagttccattatgtacagtgtcgaggg

SEQ ID NO: 105753 - DNA, 20 bp, Artificial Sequence
  primer
gacccagagagaaacccacc

SEQ ID NO: 105754 - DNA, 38 bp, Artificial Sequence
  primer
gtaaaacgacggccagtatctaatggcacagcctgacc

SEQ ID NO: 105755 - DNA, 38 bp, Artificial Sequence
  primer
gtaaaacgacggccagttggtcaatagctgtctggctg

SEQ ID NO: 105756 - DNA, 19 bp, Artificial Sequence
  primer
acgcagatttgcatcccag

SEQ ID NO: 105757 - DNA, 38 bp, Artificial Sequence
  primer
gtaaaacgacggccagtcctagccctacaccagcagag

SEQ ID NO: 105758 - DNA, 38 bp, Artificial Sequence
  primer
gtaaaacgacggccagtgtttggaaggagcacaaccag

SEQ ID NO: 105759 - DNA, 21 bp, Artificial Sequence
  primer
ggcaagaactgaggtccagag

SEQ ID NO: 105760 - DNA, 36 bp, Artificial Sequence
  primer
gtaaaacgacggccagtaacaagctgggtggaatgg

SEQ ID NO: 105761 - DNA, 21 bp, Artificial Sequence
  primer
gtctagcccaggcttgtgttg

SEQ ID NO: 105762 - DNA, 38 bp, Artificial Sequence
  primer
gtaaaacgacggccagtggcacagtctggagagaggag

SEQ ID NO: 105763 - DNA, 38 bp, Artificial Sequence
  primer
gtaaaacgacggccagtattccagcctcttcaccattc

SEQ ID NO: 105764 - DNA, 38 bp, Artificial Sequence
  primer
gtaaaacgacggccagtatgtagagcccggtctcagtg

SEQ ID NO: 105765 - DNA, 20 bp, Artificial Sequence
  primer
agctgtcctgagtgtccagc

SEQ ID NO: 105766 - DNA, 43 bp, Artificial Sequence
  primer
gtaaaacgacggccagtcagctgtcaatacaaagatctcactt

SEQ ID NO: 105767 - DNA, 21 bp, Artificial Sequence
  primer
gcccagcatggtacacagtag

SEQ ID NO: 105768 - DNA, 21 bp, Artificial Sequence
  primer
gctgataaccagggaacatgg

SEQ ID NO: 105769 - DNA, 37 bp, Artificial Sequence
  primer
gtaaaacgacggccagttcaatcttgggaacaccagg

SEQ ID NO: 105770 - DNA, 26 bp, Artificial Sequence
  primer
cagctgtcaatacaaagatctcactt

SEQ ID NO: 105771 - DNA, 19 bp, Artificial Sequence
  primer
tttaagtgcctcccaaccc

SEQ ID NO: 105772 - DNA, 35 bp, Artificial Sequence
  primer
gtaaaacgacggccagttcctgaccctgtgatccg

SEQ ID NO: 105773 - DNA, 37 bp, Artificial Sequence
  primer
gtaaaacgacggccagtaagaagccaccattcttgcc

SEQ ID NO: 105774 - DNA, 22 bp, Artificial Sequence
  primer
gatgccctaacaaagtgagctg

SEQ ID NO: 105775 - DNA, 21 bp, Artificial Sequence
  primer
aaagaacccgccagcttatac

SEQ ID NO: 105776 - DNA, 21 bp, Artificial Sequence
  primer
ggacatgtatagtttggcccg

SEQ ID NO: 105777 - DNA, 21 bp, Artificial Sequence
  primer
atgctgctacaacttggaacc

SEQ ID NO: 105778 - DNA, 37 bp, Artificial Sequence
  primer
gtaaaacgacggccagtacacgtgtccttcccacaag

SEQ ID NO: 105779 - DNA, 21 bp, Artificial Sequence
  primer
tgtgcttccatctagctcctg

SEQ ID NO: 105780 - DNA, 21 bp, Artificial Sequence
  primer
gctgataaccagggaacatgg

SEQ ID NO: 105781 - DNA, 38 bp, Artificial Sequence
  primer
gtaaaacgacggccagtgaggtggaaggtgagatccag

SEQ ID NO: 105782 - DNA, 38 bp, Artificial Sequence
  primer
gtaaaacgacggccagtaagagcagcgctatggtacag

SEQ ID NO: 105783 - DNA, 38 bp, Artificial Sequence
  primer
gtaaaacgacggccagtgagagggaagaaacagcgaac

SEQ ID NO: 105784 - DNA, 18 bp, Artificial Sequence
  primer
ctaggctgcgctgggttc

SEQ ID NO: 105785 - DNA, 38 bp, Artificial Sequence
  primer
gtaaaacgacggccagtaagtgccactggctacctacg

SEQ ID NO: 105786 - DNA, 40 bp, Artificial Sequence
  primer
gtaaaacgacggccagttttccattcaaatcattcctcag

SEQ ID NO: 105787 - DNA, 38 bp, Artificial Sequence
  primer
gtaaaacgacggccagttacgccaatttgctagtgtcc

SEQ ID NO: 105788 - DNA, 20 bp, Artificial Sequence
  primer
gcgaaactcaccttccaatg

SEQ ID NO: 105789 - DNA, 38 bp, Artificial Sequence
  primer
gtaaaacgacggccagtaaggctgggaatactgactgg

SEQ ID NO: 105790 - DNA, 20 bp, Artificial Sequence
  primer
ggctccaaaggtccagagag

SEQ ID NO: 105791 - DNA, 21 bp, Artificial Sequence
  primer
aatgactctgcaaatcctgcc

SEQ ID NO: 105792 - DNA, 21 bp, Artificial Sequence
  primer
tcatcgtcattcttccttccc

SEQ ID NO: 105793 - DNA, 38 bp, Artificial Sequence
  primer
gtaaaacgacggccagttttccaagttgacagctccag

SEQ ID NO: 105794 - DNA, 38 bp, Artificial Sequence
  primer
gtaaaacgacggccagttcctctcacttctccaccctg

SEQ ID NO: 105795 - DNA, 38 bp, Artificial Sequence
  primer
gtaaaacgacggccagtggatcccactcctgttctgtg

SEQ ID NO: 105796 - DNA, 21 bp, Artificial Sequence
  primer
gggctatcgtgcacaccttac

SEQ ID NO: 105797 - DNA, 21 bp, Artificial Sequence
  primer
ggaccctctgaatgagtccag

SEQ ID NO: 105798 - DNA, 20 bp, Artificial Sequence
  primer
gtcctttctgtccacggttg

SEQ ID NO: 105799 - DNA, 20 bp, Artificial Sequence
  primer
gagggagtggcaggtctctg

SEQ ID NO: 105800 - DNA, 21 bp, Artificial Sequence
  primer
cacagacacaaagaagccctg

SEQ ID NO: 105801 - DNA, 38 bp, Artificial Sequence
  primer
gtaaaacgacggccagtggctctagacaatcgccagtc

SEQ ID NO: 105802 - DNA, 21 bp, Artificial Sequence
  primer
taacaggtcacctccacaggc

SEQ ID NO: 105803 - DNA, 21 bp, Artificial Sequence
  primer
tccaaggtcgtgttgcagtag

SEQ ID NO: 105804 - DNA, 39 bp, Artificial Sequence
  primer
gtaaaacgacggccagtggtccggaatcctctttactcc

SEQ ID NO: 105805 - DNA, 21 bp, Artificial Sequence
  primer
agaagggagtgactgggtgac

SEQ ID NO: 105806 - DNA, 21 bp, Artificial Sequence
  primer
ggaggtgagaatgtctgggag

SEQ ID NO: 105807 - DNA, 21 bp, Artificial Sequence
  primer
gggatctgttctcagagtggg

SEQ ID NO: 105808 - DNA, 37 bp, Artificial Sequence
  primer
gtaaaacgacggccagtacccaagacgaagggaaatg

SEQ ID NO: 105809 - DNA, 21 bp, Artificial Sequence
  primer
gcaaagttccttgagccctac

SEQ ID NO: 105810 - DNA, 38 bp, Artificial Sequence
  primer
gtaaaacgacggccagtatatagagtgtgtgcgcaggg

SEQ ID NO: 105811 - DNA, 20 bp, Artificial Sequence
  primer
gtttcttccgggagcttgag

SEQ ID NO: 105812 - DNA, 22 bp, Artificial Sequence
  primer
tgagcatgtacgggcttctaac

SEQ ID NO: 105813 - DNA, 38 bp, Artificial Sequence
  primer
gtaaaacgacggccagtgggtggtatctcaaggcttcc

SEQ ID NO: 105814 - DNA, 19 bp, Artificial Sequence
  primer
cccagcacagagaacccag

SEQ ID NO: 105815 - DNA, 38 bp, Artificial Sequence
  primer
gtaaaacgacggccagtagctgctcctcttcgggatag

SEQ ID NO: 105816 - DNA, 39 bp, Artificial Sequence
  primer
gtaaaacgacggccagtaaagatagcggaaagttgggtc

SEQ ID NO: 105817 - DNA, 37 bp, Artificial Sequence
  primer
gtaaaacgacggccagtatattcggcatcaaacgctg

SEQ ID NO: 105818 - DNA, 38 bp, Artificial Sequence
  primer
gtaaaacgacggccagtacctgtgcactgtcttatcgc

SEQ ID NO: 105819 - DNA, 37 bp, Artificial Sequence
  primer
gtaaaacgacggccagtacccaccacataagcacctg

SEQ ID NO: 105820 - DNA, 38 bp, Artificial Sequence
  primer
gtaaaacgacggccagttcttcgtgtgaaaggagaggc

SEQ ID NO: 105821 - DNA, 40 bp, Artificial Sequence
  primer
gtaaaacgacggccagtttcttccagagaaacaggaaagg

SEQ ID NO: 105822 - DNA, 38 bp, Artificial Sequence
  primer
gtaaaacgacggccagtgctaagttgaaccctccctcc

SEQ ID NO: 105823 - DNA, 23 bp, Artificial Sequence
  primer
tggatgagactgaattaggacga

SEQ ID NO: 105824 - DNA, 38 bp, Artificial Sequence
  primer
gtaaaacgacggccagtacaaacaagaacgtacgctgg

SEQ ID NO: 105825 - DNA, 39 bp, Artificial Sequence
  primer
gtaaaacgacggccagtcaggttgtcaagggaatgtctg

SEQ ID NO: 105826 - DNA, 21 bp, Artificial Sequence
  primer
ctccctgctttctgaatcacc

SEQ ID NO: 105827 - DNA, 21 bp, Artificial Sequence
  primer
tagaataggcagcaaccaccg

SEQ ID NO: 105828 - DNA, 21 bp, Artificial Sequence
  primer
ctggatgattctgtggtggtg

SEQ ID NO: 105829 - DNA, 21 bp, Artificial Sequence
  primer
gtcccacagaatgacaacacc

SEQ ID NO: 105830 - DNA, 21 bp, Artificial Sequence
  primer
tgttgctacactgggtctgtg

SEQ ID NO: 105831 - DNA, 38 bp, Artificial Sequence
  primer
gtaaaacgacggccagttgtgaacgaatgaaagaaggg

SEQ ID NO: 105832 - DNA, 21 bp, Artificial Sequence
  primer
ctgcccgggaatagttatttg

SEQ ID NO: 105833 - DNA, 38 bp, Artificial Sequence
  primer
gtaaaacgacggccagttagcctggtatggatttgagg

SEQ ID NO: 105834 - DNA, 38 bp, Artificial Sequence
  primer
gtaaaacgacggccagtgacagagcccatcccagtaag

SEQ ID NO: 105835 - DNA, 21 bp, Artificial Sequence
  primer
cacagcaagaccactagcagg

SEQ ID NO: 105836 - DNA, 38 bp, Artificial Sequence
  primer
gtaaaacgacggccagttacctttaggcccaaacatgg

SEQ ID NO: 105837 - DNA, 21 bp, Artificial Sequence
  primer
acttgaaagtgtggctctcgg

SEQ ID NO: 105838 - DNA, 21 bp, Artificial Sequence
  primer
agagacaggcacagacgtgag

SEQ ID NO: 105839 - DNA, 36 bp, Artificial Sequence
  primer
gtaaaacgacggccagtctttggctttagccgcttg

SEQ ID NO: 105840 - DNA, 36 bp, Artificial Sequence
  primer
gtaaaacgacggccagtgaacagggtggcgtagcac

SEQ ID NO: 105841 - DNA, 20 bp, Artificial Sequence
  primer
cactaggctttccagggtgg

SEQ ID NO: 105842 - DNA, 21 bp, Artificial Sequence
  primer
tgaaagtggtgacactggagg

SEQ ID NO: 105843 - DNA, 38 bp, Artificial Sequence
  primer
gtaaaacgacggccagtcagagacgtcaccttctcagc

SEQ ID NO: 105844 - DNA, 21 bp, Artificial Sequence
  primer
ctgagggaggagtccacagac

SEQ ID NO: 105845 - DNA, 38 bp, Artificial Sequence
  primer
gtaaaacgacggccagtggtcccggtcatagatgtagc

SEQ ID NO: 105846 - DNA, 21 bp, Artificial Sequence
  primer
acacagaagggatcatgggac

SEQ ID NO: 105847 - DNA, 38 bp, Artificial Sequence
  primer
gtaaaacgacggccagtctacactgtggctagccctcc

SEQ ID NO: 105848 - DNA, 21 bp, Artificial Sequence
  primer
tactgaggttccctttggcag

SEQ ID NO: 105849 - DNA, 21 bp, Artificial Sequence
  primer
ctacaccaccaatgttcaccc

SEQ ID NO: 105850 - DNA, 38 bp, Artificial Sequence
  primer
gtaaaacgacggccagtgtgaagcagagggctggatag

SEQ ID NO: 105851 - DNA, 21 bp, Artificial Sequence
  primer
ctacctgccttggatcacctc

SEQ ID NO: 105852 - DNA, 21 bp, Artificial Sequence
  primer
caaacaggtagccgtagcagg

SEQ ID NO: 105853 - DNA, 21 bp, Artificial Sequence
  primer
agagagccctatcaccaaagg

SEQ ID NO: 105854 - DNA, 21 bp, Artificial Sequence
  primer
caacgagaaagcaaagttccc

SEQ ID NO: 105855 - DNA, 25 bp, Artificial Sequence
  primer
ggaacccgtacaagtaactgagaac

SEQ ID NO: 105856 - DNA, 21 bp, Artificial Sequence
  primer
gcacatcaaattcactccagc

SEQ ID NO: 105857 - DNA, 42 bp, Artificial Sequence
  primer
gtaaaacgacggccagtgccttaggataaagagagtgtttgg

SEQ ID NO: 105858 - DNA, 40 bp, Artificial Sequence
  primer
gtaaaacgacggccagttcatggaatttgccacttagttc

SEQ ID NO: 105859 - DNA, 39 bp, Artificial Sequence
  primer
gtaaaacgacggccagtcaacagtgcctctaacatggtg

SEQ ID NO: 105860 - DNA, 20 bp, Artificial Sequence
  primer
ctggctgagctctgtcattg

SEQ ID NO: 105861 - DNA, 21 bp, Artificial Sequence
  primer
tatgacccagtgcaaatgagg

SEQ ID NO: 105862 - DNA, 27 bp, Artificial Sequence
  primer
tcagttgtttcttagttacgtttccac

SEQ ID NO: 105863 - DNA, 30 bp, Artificial Sequence
  primer
tcacataactaggaagtagtcaagactcaa

SEQ ID NO: 105864 - DNA, 43 bp, Artificial Sequence
  primer
gtaaaacgacggccagttttgtacatgaatgagatgaaagttg

SEQ ID NO: 105865 - DNA, 22 bp, Artificial Sequence
  primer
caggatgggagttaaggtctcc

SEQ ID NO: 105866 - DNA, 22 bp, Artificial Sequence
  primer
caggatgggagttaaggtctcc

SEQ ID NO: 105867 - DNA, 21 bp, Artificial Sequence
  primer
gcataaccttggcctttcatc

SEQ ID NO: 105868 - DNA, 41 bp, Artificial Sequence
  primer
gtaaaacgacggccagtcaaagttcttaagagatgccagtg

SEQ ID NO: 105869 - DNA, 47 bp, Artificial Sequence
  primer
gtaaaacgacggccagtcaaagtcttcttattatagagcatcctaca

SEQ ID NO: 105870 - DNA, 21 bp, Artificial Sequence
  primer
tacccactcggactgttctcc

SEQ ID NO: 105871 - DNA, 39 bp, Artificial Sequence
  primer
gtaaaacgacggccagtaacatttccaaacgtttatccc

SEQ ID NO: 105872 - DNA, 27 bp, Artificial Sequence
  primer
tcaattcattacgttaggagatttgtt

SEQ ID NO: 105873 - DNA, 38 bp, Artificial Sequence
  primer
gtaaaacgacggccagtcaatttccactggtatgtcgc

SEQ ID NO: 105874 - DNA, 24 bp, Artificial Sequence
  primer
tgaagattgatctagtagcttgcc

SEQ ID NO: 105875 - DNA, 21 bp, Artificial Sequence
  primer
gagatattagttgccagccgc

SEQ ID NO: 105876 - DNA, 38 bp, Artificial Sequence
  primer
gtaaaacgacggccagtagcacagatggtgcttctcag

SEQ ID NO: 105877 - DNA, 38 bp, Artificial Sequence
  primer
gtaaaacgacggccagtccctaccatgatcctgcagtc

SEQ ID NO: 105878 - DNA, 24 bp, Artificial Sequence
  primer
tctgagaagttggttgaatgtgtc

SEQ ID NO: 105879 - DNA, 37 bp, Artificial Sequence
  primer
gtaaaacgacggccagttttgtcctttgcatgaaggc

SEQ ID NO: 105880 - DNA, 24 bp, Artificial Sequence
  primer
tcaaacatgcctacaatttctcag

SEQ ID NO: 105881 - DNA, 39 bp, Artificial Sequence
  primer
gtaaaacgacggccagtagaacagcatgaagactgctga

SEQ ID NO: 105882 - DNA, 20 bp, Artificial Sequence
  primer
tgctgattgttctggtgtgg

SEQ ID NO: 105883 - DNA, 27 bp, Artificial Sequence
  primer
gaaagacaagttcactagcctaatttc

SEQ ID NO: 105884 - DNA, 39 bp, Artificial Sequence
  primer
gtaaaacgacggccagtggaacaatcaggaacgtaaagg

SEQ ID NO: 105885 - DNA, 41 bp, Artificial Sequence
  primer
gtaaaacgacggccagtgttacctgaaataaccatggaact

SEQ ID NO: 105886 - DNA, 21 bp, Artificial Sequence
  primer
ttcacaagaaacaatttgggc

SEQ ID NO: 105887 - DNA, 38 bp, Artificial Sequence
  primer
gtaaaacgacggccagttatccaaacagccagcaggac

SEQ ID NO: 105888 - DNA, 21 bp, Artificial Sequence
  primer
tacagatgctggattgcttgg

SEQ ID NO: 105889 - DNA, 25 bp, Artificial Sequence
  primer
caactttgaccttaaatgcgttatc

SEQ ID NO: 105890 - DNA, 22 bp, Artificial Sequence
  primer
tcacaagtcacagcctgaactg

SEQ ID NO: 105891 - DNA, 21 bp, Artificial Sequence
  primer
tcattgctccctcctgcttag

SEQ ID NO: 105892 - DNA, 44 bp, Artificial Sequence
  primer
gtaaaacgacggccagtcagtgatatggatgtttaactcttctg

SEQ ID NO: 105893 - DNA, 21 bp, Artificial Sequence
  primer
tggctctgccacttaactttg

SEQ ID NO: 105894 - DNA, 41 bp, Artificial Sequence
  primer
gtaaaacgacggccagtcaagatttatatgcatttggcacc

SEQ ID NO: 105895 - DNA, 36 bp, Artificial Sequence
  primer
gtaaaacgacggccagtggaacagagcaggctggtg

SEQ ID NO: 105896 - DNA, 21 bp, Artificial Sequence
  primer
gacgggtggtctctctcactc

SEQ ID NO: 105897 - DNA, 21 bp, Artificial Sequence
  primer
acaacagcgcagaggctttac

SEQ ID NO: 105898 - DNA, 39 bp, Artificial Sequence
  primer
gtaaaacgacggccagtcgctaacccagatgcactaaac

SEQ ID NO: 105899 - DNA, 21 bp, Artificial Sequence
  primer
tgagcctagaccctggagatg

SEQ ID NO: 105900 - DNA, 37 bp, Artificial Sequence
  primer
gtaaaacgacggccagtgttgtgcctccatgagcttc

SEQ ID NO: 105901 - DNA, 38 bp, Artificial Sequence
  primer
gtaaaacgacggccagtattcccataggatctgccaac

SEQ ID NO: 105902 - DNA, 38 bp, Artificial Sequence
  primer
gtaaaacgacggccagtagcccataaatatacacccgc

SEQ ID NO: 105903 - DNA, 20 bp, Artificial Sequence
  primer
tcccaaagtgcaggtgtgag

SEQ ID NO: 105904 - DNA, 38 bp, Artificial Sequence
  primer
gtaaaacgacggccagtggcttgacaatgatgagaacc

SEQ ID NO: 105905 - DNA, 20 bp, Artificial Sequence
  primer
ctggaattacaggcacccac

SEQ ID NO: 105906 - DNA, 38 bp, Artificial Sequence
  primer
gtaaaacgacggccagtacagtgggccaagattactcc

SEQ ID NO: 105907 - DNA, 21 bp, Artificial Sequence
  primer
taatgactctgggcctcttcc

SEQ ID NO: 105908 - DNA, 38 bp, Artificial Sequence
  primer
gtaaaacgacggccagtgccacaaagtgatggacactg

SEQ ID NO: 105909 - DNA, 35 bp, Artificial Sequence
  primer
gtaaaacgacggccagtctctcgaggaccagccag

SEQ ID NO: 105910 - DNA, 21 bp, Artificial Sequence
  primer
gctgtcttgtcgtaggcattg

SEQ ID NO: 105911 - DNA, 38 bp, Artificial Sequence
  primer
gtaaaacgacggccagtccatctacaacatcccaatgc

SEQ ID NO: 105912 - DNA, 21 bp, Artificial Sequence
  primer
ctgatacacacaggcacgacc

SEQ ID NO: 105913 - DNA, 22 bp, Artificial Sequence
  primer
ccaaaggtttgataactgtgcc

SEQ ID NO: 105914 - DNA, 38 bp, Artificial Sequence
  primer
gtaaaacgacggccagtgagcttggatgacctggattc

SEQ ID NO: 105915 - DNA, 38 bp, Artificial Sequence
  primer
gtaaaacgacggccagtgctgtcagaccacttcctgtg

SEQ ID NO: 105916 - DNA, 21 bp, Artificial Sequence
  primer
agccacttctttcgtagctgg

SEQ ID NO: 105917 - DNA, 21 bp, Artificial Sequence
  primer
agtcaatgatgaacactgcgg

SEQ ID NO: 105918 - DNA, 21 bp, Artificial Sequence
  primer
tccaaacctgaatccttagcc

SEQ ID NO: 105919 - DNA, 21 bp, Artificial Sequence
  primer
cctgactaaatgctggctgag

SEQ ID NO: 105920 - DNA, 21 bp, Artificial Sequence
  primer
tccaggtaataagggtgggag

SEQ ID NO: 105921 - DNA, 38 bp, Artificial Sequence
  primer
gtaaaacgacggccagtggttaaccaggcctcaaattc

SEQ ID NO: 105922 - DNA, 25 bp, Artificial Sequence
  primer
aatactttgggaccaaacttctacg

SEQ ID NO: 105923 - DNA, 18 bp, Artificial Sequence
  primer
gcgcacggtctgtaatcc

SEQ ID NO: 105924 - DNA, 20 bp, Artificial Sequence
  primer
gtgacctgaaatcgcaccac

SEQ ID NO: 105925 - DNA, 39 bp, Artificial Sequence
  primer
gtaaaacgacggccagtaaggagcaggtatgtttctccc

SEQ ID NO: 105926 - DNA, 40 bp, Artificial Sequence
  primer
gtaaaacgacggccagtcaacagaataagatcctgcctca

SEQ ID NO: 105927 - DNA, 38 bp, Artificial Sequence
  primer
gtaaaacgacggccagttttatcgccatccttctgaac

SEQ ID NO: 105928 - DNA, 21 bp, Artificial Sequence
  primer
tatgaatggaagagccatccc

SEQ ID NO: 105929 - DNA, 38 bp, Artificial Sequence
  primer
gtaaaacgacggccagtgtgttgccatgataaactggg

SEQ ID NO: 105930 - DNA, 21 bp, Artificial Sequence
  primer
atttgggtcttactgggcatc

SEQ ID NO: 105931 - DNA, 24 bp, Artificial Sequence
  primer
cacacaaactccttacacttgacc

SEQ ID NO: 105932 - DNA, 38 bp, Artificial Sequence
  primer
gtaaaacgacggccagtgggtatcaacagcacctgagc

SEQ ID NO: 105933 - DNA, 21 bp, Artificial Sequence
  primer
taggaaaggtgctttgggaag

SEQ ID NO: 105934 - DNA, 19 bp, Artificial Sequence
  primer
gaccctgtgccctggtaac

SEQ ID NO: 105935 - DNA, 38 bp, Artificial Sequence
  primer
gtaaaacgacggccagtgtcctgttcttcaccagggtc

SEQ ID NO: 105936 - DNA, 39 bp, Artificial Sequence
  primer
gtaaaacgacggccagttctgcatgtaccacagaattgc

SEQ ID NO: 105937 - DNA, 38 bp, Artificial Sequence
  primer
gtaaaacgacggccagtagatgattacctcgctctggc

SEQ ID NO: 105938 - DNA, 19 bp, Artificial Sequence
  primer
gggaatatgggttcaagcg

SEQ ID NO: 105939 - DNA, 38 bp, Artificial Sequence
  primer
gtaaaacgacggccagtaaaccaaatgtcaaaggaccc

SEQ ID NO: 105940 - DNA, 21 bp, Artificial Sequence
  primer
cgctaacagtgcgtatcttcc

SEQ ID NO: 105941 - DNA, 22 bp, Artificial Sequence
  primer
aatgcagtgtgacttgcctatg

SEQ ID NO: 105942 - DNA, 36 bp, Artificial Sequence
  primer
gtaaaacgacggccagtctctggacagtggactgcg

SEQ ID NO: 105943 - DNA, 38 bp, Artificial Sequence
  primer
gtaaaacgacggccagtattcatgcctcactccagagg

SEQ ID NO: 105944 - DNA, 21 bp, Artificial Sequence
  primer
atgtgttgtcctggccatacc

SEQ ID NO: 105945 - DNA, 37 bp, Artificial Sequence
  primer
gtaaaacgacggccagtctctgaccagcagggacaac

SEQ ID NO: 105946 - DNA, 38 bp, Artificial Sequence
  primer
gtaaaacgacggccagtcacctggacagtgaggacaag

SEQ ID NO: 105947 - DNA, 21 bp, Artificial Sequence
  primer
cactatgcgacagaatgaggc

SEQ ID NO: 105948 - DNA, 19 bp, Artificial Sequence
  primer
tccacagcctgctgtcttc

SEQ ID NO: 105949 - DNA, 38 bp, Artificial Sequence
  primer
gtaaaacgacggccagtccatctcagcgactctaaggc

SEQ ID NO: 105950 - DNA, 21 bp, Artificial Sequence
  primer
caactcaaccaaccctcacac

SEQ ID NO: 105951 - DNA, 20 bp, Artificial Sequence
  primer
agcagtggatattccgggag

SEQ ID NO: 105952 - DNA, 38 bp, Artificial Sequence
  primer
gtaaaacgacggccagtgttctcaagcattcccaatcg

SEQ ID NO: 105953 - DNA, 39 bp, Artificial Sequence
  primer
gtaaaacgacggccagtcaggaagtactgaaaggcatgg

SEQ ID NO: 105954 - DNA, 39 bp, Artificial Sequence
  primer
gtaaaacgacggccagtcagagtggaattcaggaaggtg

SEQ ID NO: 105955 - DNA, 38 bp, Artificial Sequence
  primer
gtaaaacgacggccagtaagataggacaccctccctcc

SEQ ID NO: 105956 - DNA, 21 bp, Artificial Sequence
  primer
gggaaatgactctatcaggcg

SEQ ID NO: 105957 - DNA, 38 bp, Artificial Sequence
  primer
gtaaaacgacggccagttgaatgcctcttccctactcc

SEQ ID NO: 105958 - DNA, 38 bp, Artificial Sequence
  primer
gtaaaacgacggccagtgtgagatgtgcctttcacctg

SEQ ID NO: 105959 - DNA, 20 bp, Artificial Sequence
  primer
acaggtgtaaaccaccacgc

SEQ ID NO: 105960 - DNA, 40 bp, Artificial Sequence
  primer
gtaaaacgacggccagtctggaagagctacctcagtgttc

SEQ ID NO: 105961 - DNA, 22 bp, Artificial Sequence
  primer
tgctgcccttagcacagaatac

SEQ ID NO: 105962 - DNA, 25 bp, Artificial Sequence
  primer
tgcctataaatgacggaataaactc

SEQ ID NO: 105963 - DNA, 21 bp, Artificial Sequence
  primer
gcctgagtgatggagtgagac

SEQ ID NO: 105964 - DNA, 39 bp, Artificial Sequence
  primer
gtaaaacgacggccagtaagcaattacaactacgctggg

SEQ ID NO: 105965 - DNA, 18 bp, Artificial Sequence
  primer
cccacactgtaggcgtcg

SEQ ID NO: 105966 - DNA, 37 bp, Artificial Sequence
  primer
gtaaaacgacggccagtctcttgcatgatgaggtggg

SEQ ID NO: 105967 - DNA, 18 bp, Artificial Sequence
  primer
ggctgaaatcccgagacc

SEQ ID NO: 105968 - DNA, 38 bp, Artificial Sequence
  primer
gtaaaacgacggccagtttctaggacagaatgccagcc

SEQ ID NO: 105969 - DNA, 38 bp, Artificial Sequence
  primer
gtaaaacgacggccagtcacactgagcacttgtgatgc

SEQ ID NO: 105970 - DNA, 21 bp, Artificial Sequence
  primer
ggcagagtgcagctcataatc

SEQ ID NO: 105971 - DNA, 21 bp, Artificial Sequence
  primer
ggcttctcacaatctcccttg

SEQ ID NO: 105972 - DNA, 38 bp, Artificial Sequence
  primer
gtaaaacgacggccagtatatgacacccagttcctggc

SEQ ID NO: 105973 - DNA, 21 bp, Artificial Sequence
  primer
acaagatggtttgggatggtc

SEQ ID NO: 105974 - DNA, 37 bp, Artificial Sequence
  primer
gtaaaacgacggccagtgagttcgggagggagtgaac

SEQ ID NO: 105975 - DNA, 21 bp, Artificial Sequence
  primer
ggcagagcctcctctacaatc

SEQ ID NO: 105976 - DNA, 21 bp, Artificial Sequence
  primer
gcataatgcatcggctttcac

SEQ ID NO: 105977 - DNA, 22 bp, Artificial Sequence
  primer
ttagttgagcctgctcagatcc

SEQ ID NO: 105978 - DNA, 38 bp, Artificial Sequence
  primer
gtaaaacgacggccagtgcacacgtcagatctcgattc

SEQ ID NO: 105979 - DNA, 38 bp, Artificial Sequence
  primer
gtaaaacgacggccagtctcagaagcagcaggaaggac

SEQ ID NO: 105980 - DNA, 38 bp, Artificial Sequence
  primer
gtaaaacgacggccagtaagagcatccttcgacttccc

SEQ ID NO: 105981 - DNA, 22 bp, Artificial Sequence
  primer
ttccctatgaaggaaagaaggg

SEQ ID NO: 105982 - DNA, 20 bp, Artificial Sequence
  primer
ggaacactctctcccaaccc

SEQ ID NO: 105983 - DNA, 38 bp, Artificial Sequence
  primer
gtaaaacgacggccagtcttgccctacagaatccaacc

SEQ ID NO: 105984 - DNA, 21 bp, Artificial Sequence
  primer
atttctacccgaggcacaatc

SEQ ID NO: 105985 - DNA, 24 bp, Artificial Sequence
  primer
aagttgcctagttcaacaagaagc

SEQ ID NO: 105986 - DNA, 41 bp, Artificial Sequence
  primer
gtaaaacgacggccagtcctgacattaatgactgtgtgtcc

SEQ ID NO: 105987 - DNA, 38 bp, Artificial Sequence
  primer
gtaaaacgacggccagtggaaatgaactcaccatgcac

SEQ ID NO: 105988 - DNA, 19 bp, Artificial Sequence
  primer
gggcacatcatcacgagag

SEQ ID NO: 105989 - DNA, 39 bp, Artificial Sequence
  primer
gtaaaacgacggccagtcatccacaataggtgagctgtg

SEQ ID NO: 105990 - DNA, 22 bp, Artificial Sequence
  primer
tttcagaggcaaggagcatatc

SEQ ID NO: 105991 - DNA, 22 bp, Artificial Sequence
  primer
tgtacaacttccaagcaccaag

SEQ ID NO: 105992 - DNA, 21 bp, Artificial Sequence
  primer
agccacctttccacgtacaag

SEQ ID NO: 105993 - DNA, 21 bp, Artificial Sequence
  primer
gcagcataaacaatgacctgg

SEQ ID NO: 105994 - DNA, 38 bp, Artificial Sequence
  primer
gtaaaacgacggccagtgcaaccatctcctactccagg

SEQ ID NO: 105995 - DNA, 27 bp, Artificial Sequence
  primer
ctggtgaaatatataagaacttccagg

SEQ ID NO: 105996 - DNA, 38 bp, Artificial Sequence
  primer
gtaaaacgacggccagtcttccctttatcaggcttccc

SEQ ID NO: 105997 - DNA, 38 bp, Artificial Sequence
  primer
gtaaaacgacggccagtctgactgcaaacaattcccac

SEQ ID NO: 105998 - DNA, 21 bp, Artificial Sequence
  primer
agggaatgactgcttggagac

SEQ ID NO: 105999 - DNA, 40 bp, Artificial Sequence
  primer
gtaaaacgacggccagttcagacctctcaccaagctagac

SEQ ID NO: 106000 - DNA, 38 bp, Artificial Sequence
  primer
gtaaaacgacggccagtcttcttgaaggagctggtttg

SEQ ID NO: 106001 - DNA, 37 bp, Artificial Sequence
  primer
gtaaaacgacggccagtagacgcacacacctctcacc

SEQ ID NO: 106002 - DNA, 38 bp, Artificial Sequence
  primer
gtaaaacgacggccagtctgtcataaagctgtgcctgc

SEQ ID NO: 106003 - DNA, 21 bp, Artificial Sequence
  primer
gcatagtgatttgctcaacgc

SEQ ID NO: 106004 - DNA, 20 bp, Artificial Sequence
  primer
agctctccggatctctccag

SEQ ID NO: 106005 - DNA, 21 bp, Artificial Sequence
  primer
gggtgggagagaggttaaagc

SEQ ID NO: 106006 - DNA, 38 bp, Artificial Sequence
  primer
gtaaaacgacggccagtatgtcctcactcagagcctgg

SEQ ID NO: 106007 - DNA, 21 bp, Artificial Sequence
  primer
gaccagctattgtgatgacgg

SEQ ID NO: 106008 - DNA, 21 bp, Artificial Sequence
  primer
ttgtgcacagtaagtgcgttg

SEQ ID NO: 106009 - DNA, 38 bp, Artificial Sequence
  primer
gtaaaacgacggccagttgaacagatgctcccttctcc

SEQ ID NO: 106010 - DNA, 21 bp, Artificial Sequence
  primer
gaaatgggatggaggtgagtg

SEQ ID NO: 106011 - DNA, 21 bp, Artificial Sequence
  primer
atttgcagttcagtcccaggt

SEQ ID NO: 106012 - DNA, 20 bp, Artificial Sequence
  primer
ctcagactcctccctcggac

SEQ ID NO: 106013 - DNA, 38 bp, Artificial Sequence
  primer
gtaaaacgacggccagtgccatacgcataaggcttgac

SEQ ID NO: 106014 - DNA, 38 bp, Artificial Sequence
  primer
gtaaaacgacggccagtgtttcctgaaatgggtctggt

SEQ ID NO: 106015 - DNA, 21 bp, Artificial Sequence
  primer
gtctgtgccagagtgacaagg

SEQ ID NO: 106016 - DNA, 20 bp, Artificial Sequence
  primer
aagacaggtacagggctggg

SEQ ID NO: 106017 - DNA, 21 bp, Artificial Sequence
  primer
gcctgtgacttaacccaggac

SEQ ID NO: 106018 - DNA, 21 bp, Artificial Sequence
  primer
ctgagccacagctaggacgag

SEQ ID NO: 106019 - DNA, 21 bp, Artificial Sequence
  primer
tcctactccagtgctcccaac

SEQ ID NO: 106020 - DNA, 38 bp, Artificial Sequence
  primer
gtaaaacgacggccagtcagatgtagagaccgaggcag

SEQ ID NO: 106021 - DNA, 36 bp, Artificial Sequence
  primer
gtaaaacgacggccagtggctcctagctgccaagtg

SEQ ID NO: 106022 - DNA, 21 bp, Artificial Sequence
  primer
ctggaagcttctccaggacag

SEQ ID NO: 106023 - DNA, 22 bp, Artificial Sequence
  primer
tgcagggaggaatcttacactc

SEQ ID NO: 106024 - DNA, 39 bp, Artificial Sequence
  primer
gtaaaacgacggccagtgagacagaggatccgtatctgg

SEQ ID NO: 106025 - DNA, 21 bp, Artificial Sequence
  primer
caccaaggttaggtgagaggg

SEQ ID NO: 106026 - DNA, 20 bp, Artificial Sequence
  primer
cctagggagtggcctttcag

SEQ ID NO: 106027 - DNA, 20 bp, Artificial Sequence
  primer
ggcactgcccttaccttctg

SEQ ID NO: 106028 - DNA, 36 bp, Artificial Sequence
  primer
gtaaaacgacggccagtagtggagaggtgtggtggg

SEQ ID NO: 106029 - DNA, 21 bp, Artificial Sequence
  primer
ggtccgaagttcgtcctgtag

SEQ ID NO: 106030 - DNA, 21 bp, Artificial Sequence
  primer
aaggagggtcctcttggagac

SEQ ID NO: 106031 - DNA, 21 bp, Artificial Sequence
  primer
tgcagagagactcaggcagac

SEQ ID NO: 106032 - DNA, 22 bp, Artificial Sequence
  primer
tgggtaatacttgcctcacagg

SEQ ID NO: 106033 - DNA, 21 bp, Artificial Sequence
  primer
tccttggctgatggtctactg

SEQ ID NO: 106034 - DNA, 37 bp, Artificial Sequence
  primer
gtaaaacgacggccagtttgggatgaggttgagatgg

SEQ ID NO: 106035 - DNA, 20 bp, Artificial Sequence
  primer
ccaccagaggtagcagaccc

SEQ ID NO: 106036 - DNA, 21 bp, Artificial Sequence
  primer
cttagggagaacccatccctc

SEQ ID NO: 106037 - DNA, 38 bp, Artificial Sequence
  primer
gtaaaacgacggccagtccacaaggtcttgattgggtc

SEQ ID NO: 106038 - DNA, 20 bp, Artificial Sequence
  primer
ctacggctcagcctctcaag

SEQ ID NO: 106039 - DNA, 21 bp, Artificial Sequence
  primer
tttcaattatgccaagggctc

SEQ ID NO: 106040 - DNA, 21 bp, Artificial Sequence
  primer
tttgggagggagtggaaatag

SEQ ID NO: 106041 - DNA, 39 bp, Artificial Sequence
  primer
gtaaaacgacggccagtagccactgactggacttctctc

SEQ ID NO: 106042 - DNA, 44 bp, Artificial Sequence
  primer
gtaaaacgacggccagtaaatgaatgccctataagtttcatatc

SEQ ID NO: 106043 - DNA, 20 bp, Artificial Sequence
  primer
attctccggctcaagcaatc

SEQ ID NO: 106044 - DNA, 38 bp, Artificial Sequence
  primer
gtaaaacgacggccagttgggctacaaattgtgctgac

SEQ ID NO: 106045 - DNA, 37 bp, Artificial Sequence
  primer
gtaaaacgacggccagtttgcttaaacctgggaggtg

SEQ ID NO: 106046 - DNA, 21 bp, Artificial Sequence
  primer
ttcccaagtaccattccaagg

SEQ ID NO: 106047 - DNA, 21 bp, Artificial Sequence
  primer
tgaaatggatctttgcctgtg

SEQ ID NO: 106048 - DNA, 39 bp, Artificial Sequence
  primer
gtaaaacgacggccagtcatctgtgcatacttacgctgc

SEQ ID NO: 106049 - DNA, 20 bp, Artificial Sequence
  primer
caccttgaattccttcctgc

SEQ ID NO: 106050 - DNA, 24 bp, Artificial Sequence
  primer
tcccaaagttaagtgattcattcc

SEQ ID NO: 106051 - DNA, 38 bp, Artificial Sequence
  primer
gtaaaacgacggccagtccagccacaactgaagtgttc

SEQ ID NO: 106052 - DNA, 38 bp, Artificial Sequence
  primer
gtaaaacgacggccagtgcatcaggtttgtgttgaacc

SEQ ID NO: 106053 - DNA, 40 bp, Artificial Sequence
  primer
gtaaaacgacggccagttcaccttgaaaggcaattctaaa

SEQ ID NO: 106054 - DNA, 37 bp, Artificial Sequence
  primer
gtaaaacgacggccagtgcctaaagggcaaggagatg

SEQ ID NO: 106055 - DNA, 25 bp, Artificial Sequence
  primer
tttataagcttcaatttggcacaag

SEQ ID NO: 106056 - DNA, 39 bp, Artificial Sequence
  primer
gtaaaacgacggccagtcacaacaaactgttggccttac

SEQ ID NO: 106057 - DNA, 38 bp, Artificial Sequence
  primer
gtaaaacgacggccagttactgggctttagcttggttg

SEQ ID NO: 106058 - DNA, 19 bp, Artificial Sequence
  primer
tttgtgcagacatgcttgg

SEQ ID NO: 106059 - DNA, 23 bp, Artificial Sequence
  primer
tgaccaatcctctttcagatgag

SEQ ID NO: 106060 - DNA, 38 bp, Artificial Sequence
  primer
gtaaaacgacggccagtttactcaaagaccacggttcc

SEQ ID NO: 106061 - DNA, 38 bp, Artificial Sequence
  primer
gtaaaacgacggccagttcaaatcctgcaatgaaaccc

SEQ ID NO: 106062 - DNA, 38 bp, Artificial Sequence
  primer
gtaaaacgacggccagttccctggactcgtaaatagcc

SEQ ID NO: 106063 - DNA, 40 bp, Artificial Sequence
  primer
gtaaaacgacggccagtttatgtagcaagtgacagatggc

SEQ ID NO: 106064 - DNA, 21 bp, Artificial Sequence
  primer
agcaagtcaacattccttccc

SEQ ID NO: 106065 - DNA, 21 bp, Artificial Sequence
  primer
gaaggatgctccactgttctg

SEQ ID NO: 106066 - DNA, 21 bp, Artificial Sequence
  primer
cttgtctcttggtggcatacg

SEQ ID NO: 106067 - DNA, 38 bp, Artificial Sequence
  primer
gtaaaacgacggccagttcgccttgcacttcatacttc

SEQ ID NO: 106068 - DNA, 21 bp, Artificial Sequence
  primer
ctttacctccattctcaggcg

SEQ ID NO: 106069 - DNA, 38 bp, Artificial Sequence
  primer
gtaaaacgacggccagtggaaaggttccatctcgactc

SEQ ID NO: 106070 - DNA, 21 bp, Artificial Sequence
  primer
ggctgaatgtttacaggccac

SEQ ID NO: 106071 - DNA, 21 bp, Artificial Sequence
  primer
cccacctgtgtggagaaagac

SEQ ID NO: 106072 - DNA, 21 bp, Artificial Sequence
  primer
ctgtggtagcagcacaacctc

SEQ ID NO: 106073 - DNA, 21 bp, Artificial Sequence
  primer
tcaccagtgacagtccagagg

SEQ ID NO: 106074 - DNA, 38 bp, Artificial Sequence
  primer
gtaaaacgacggccagtctgtgtcaggattcgcacttg

SEQ ID NO: 106075 - DNA, 37 bp, Artificial Sequence
  primer
gtaaaacgacggccagtgctgagtgatgggagtggac

SEQ ID NO: 106076 - DNA, 38 bp, Artificial Sequence
  primer
gtaaaacgacggccagttctcaagagccaagcacacac

SEQ ID NO: 106077 - DNA, 38 bp, Artificial Sequence
  primer
gtaaaacgacggccagtcaggcttccacagaaggtctc

SEQ ID NO: 106078 - DNA, 21 bp, Artificial Sequence
  primer
agagtggctgcgatcagaaac

SEQ ID NO: 106079 - DNA, 22 bp, Artificial Sequence
  primer
ccttcccagtaagaaatttggg

SEQ ID NO: 106080 - DNA, 39 bp, Artificial Sequence
  primer
gtaaaacgacggccagttctcagctacaccttaccaggg

SEQ ID NO: 106081 - DNA, 38 bp, Artificial Sequence
  primer
gtaaaacgacggccagtcacactgggtttcaatgcaag

SEQ ID NO: 106082 - DNA, 20 bp, Artificial Sequence
  primer
gaaacaggagagacaggccc

SEQ ID NO: 106083 - DNA, 37 bp, Artificial Sequence
  primer
gtaaaacgacggccagttcaatgaaagggacaggtgc

SEQ ID NO: 106084 - DNA, 21 bp, Artificial Sequence
  primer
cctcaaatggataaacaggcg

SEQ ID NO: 106085 - DNA, 38 bp, Artificial Sequence
  primer
gtaaaacgacggccagtccagctctgtgaccaagacag

SEQ ID NO: 106086 - DNA, 21 bp, Artificial Sequence
  primer
agactaagcagtccagcggag

SEQ ID NO: 106087 - DNA, 38 bp, Artificial Sequence
  primer
gtaaaacgacggccagtacagccctacaccacccatac

SEQ ID NO: 106088 - DNA, 23 bp, Artificial Sequence
  primer
tcactcaaatcagcagggataag

SEQ ID NO: 106089 - DNA, 26 bp, Artificial Sequence
  primer
tgctgggctacttaataatacaatcc

SEQ ID NO: 106090 - DNA, 38 bp, Artificial Sequence
  primer
gtaaaacgacggccagtagtgatctgcctgcctcagtc

SEQ ID NO: 106091 - DNA, 23 bp, Artificial Sequence
  primer
gattacaagcatgagccatcatc

SEQ ID NO: 106092 - DNA, 36 bp, Artificial Sequence
  primer
gtaaaacgacggccagtggcaaggaatgtaggctgc

SEQ ID NO: 106093 - DNA, 27 bp, Artificial Sequence
  primer
gtccaagggtcaactgtatattaaatc

SEQ ID NO: 106094 - DNA, 22 bp, Artificial Sequence
  primer
cagttatggtgctctaatgcca

SEQ ID NO: 106095 - DNA, 21 bp, Artificial Sequence
  primer
tgcagaaataccagcttccac

SEQ ID NO: 106096 - DNA, 38 bp, Artificial Sequence
  primer
gtaaaacgacggccagtacgaatgtgcgttatactggg

SEQ ID NO: 106097 - DNA, 24 bp, Artificial Sequence
  primer
gaatgaccaagagtaatgatggag

SEQ ID NO: 106098 - DNA, 21 bp, Artificial Sequence
  primer
gacgtgacattcctctctccc

SEQ ID NO: 106099 - DNA, 21 bp, Artificial Sequence
  primer
taagccttattgctgcctcgt

SEQ ID NO: 106100 - DNA, 44 bp, Artificial Sequence
  primer
gtaaaacgacggccagttggaatctatatataccctcagcaaca

SEQ ID NO: 106101 - DNA, 20 bp, Artificial Sequence
  primer
aaatccacaacacccacagg

SEQ ID NO: 106102 - DNA, 21 bp, Artificial Sequence
  primer
accaacaggctcagacaacag

SEQ ID NO: 106103 - DNA, 22 bp, Artificial Sequence
  primer
cactgtgcatgtttcacttcag

SEQ ID NO: 106104 - DNA, 25 bp, Artificial Sequence
  primer
cagtacattaccttgtccaaattgc

SEQ ID NO: 106105 - DNA, 38 bp, Artificial Sequence
  primer
gtaaaacgacggccagtactcctgagcacaagcaatcc

SEQ ID NO: 106106 - DNA, 24 bp, Artificial Sequence
  primer
aaatttaaacaggaatttgttgct

SEQ ID NO: 106107 - DNA, 21 bp, Artificial Sequence
  primer
ctcctcgcctccttctgtaac

SEQ ID NO: 106108 - DNA, 21 bp, Artificial Sequence
  primer
gcacagtgcttctcaatgtgg

SEQ ID NO: 106109 - DNA, 38 bp, Artificial Sequence
  primer
gtaaaacgacggccagtgtcgttacctctgtgtggtgg

SEQ ID NO: 106110 - DNA, 39 bp, Artificial Sequence
  primer
gtaaaacgacggccagttgactttcaaatgtgaggatgc

SEQ ID NO: 106111 - DNA, 21 bp, Artificial Sequence
  primer
aaggagggaaggtgaaggaat

SEQ ID NO: 106112 - DNA, 21 bp, Artificial Sequence
  primer
aatggtggtcctgcaacctac

SEQ ID NO: 106113 - DNA, 21 bp, Artificial Sequence
  primer
ccaataaacactgctcccacc

SEQ ID NO: 106114 - DNA, 21 bp, Artificial Sequence
  primer
caattaaggaatcctggcctc

SEQ ID NO: 106115 - DNA, 40 bp, Artificial Sequence
  primer
gtaaaacgacggccagtggtggtagagtaggtaaggaggg

SEQ ID NO: 106116 - DNA, 21 bp, Artificial Sequence
  primer
tttgatgaaagaagtgcaccc

SEQ ID NO: 106117 - DNA, 44 bp, Artificial Sequence
  primer
gtaaaacgacggccagtaaacaatctgaatatcatcactgcttc

SEQ ID NO: 106118 - DNA, 21 bp, Artificial Sequence
  primer
tacctgtctggcctgtcactg

SEQ ID NO: 106119 - DNA, 41 bp, Artificial Sequence
  primer
gtaaaacgacggccagttggatcttataaccttccaacacg

SEQ ID NO: 106120 - DNA, 25 bp, Artificial Sequence
  primer
gaagatcttaagagcagcatgaaag

SEQ ID NO: 106121 - DNA, 21 bp, Artificial Sequence
  primer
tgagcccacaagcattaccta

SEQ ID NO: 106122 - DNA, 39 bp, Artificial Sequence
  primer
gtaaaacgacggccagtgccagggaaacaactgagtaac

SEQ ID NO: 106123 - DNA, 22 bp, Artificial Sequence
  primer
tggtccatatgctaaggtcttg

SEQ ID NO: 106124 - DNA, 38 bp, Artificial Sequence
  primer
gtaaaacgacggccagttcctcaaatcatcttcccacc

SEQ ID NO: 106125 - DNA, 38 bp, Artificial Sequence
  primer
gtaaaacgacggccagtgccaccaaggcacatattaag

SEQ ID NO: 106126 - DNA, 38 bp, Artificial Sequence
  primer
gtaaaacgacggccagtaccactggagcataaacaccc

SEQ ID NO: 106127 - DNA, 22 bp, Artificial Sequence
  primer
tcatgtgtaggtttctctggca

SEQ ID NO: 106128 - DNA, 21 bp, Artificial Sequence
  primer
gtgccaggtgttgtctctttg

SEQ ID NO: 106129 - DNA, 36 bp, Artificial Sequence
  primer
gtaaaacgacggccagtactagggaatgcccacagc

SEQ ID NO: 106130 - DNA, 43 bp, Artificial Sequence
  primer
gtaaaacgacggccagtgaaagagcttgctacacttaacattc

SEQ ID NO: 106131 - DNA, 38 bp, Artificial Sequence
  primer
gtaaaacgacggccagtccaaatttcacacaaacaccg

SEQ ID NO: 106132 - DNA, 41 bp, Artificial Sequence
  primer
gtaaaacgacggccagtcctgactatgaaataatacgcaca

SEQ ID NO: 106133 - DNA, 38 bp, Artificial Sequence
  primer
gtaaaacgacggccagttggtggtgacttgttctctgc

SEQ ID NO: 106134 - DNA, 24 bp, Artificial Sequence
  primer
ggactctgctcctatactggaaac

SEQ ID NO: 106135 - DNA, 38 bp, Artificial Sequence
  primer
gtaaaacgacggccagtacgatgctcaacgcagttatt

SEQ ID NO: 106136 - DNA, 24 bp, Artificial Sequence
  primer
gcagttaagactagaggcttgtgc

SEQ ID NO: 106137 - DNA, 19 bp, Artificial Sequence
  primer
ccctggctccaattctctc

SEQ ID NO: 106138 - DNA, 38 bp, Artificial Sequence
  primer
gtaaaacgacggccagtatttccggctctttagggaag

SEQ ID NO: 106139 - DNA, 38 bp, Artificial Sequence
  primer
gtaaaacgacggccagtaaacggccaaatcacttcatc

SEQ ID NO: 106140 - DNA, 38 bp, Artificial Sequence
  primer
gtaaaacgacggccagttattaccatgtggtcctgccc

SEQ ID NO: 106141 - DNA, 20 bp, Artificial Sequence
  primer
gcctaattggcatgatgctg

SEQ ID NO: 106142 - DNA, 38 bp, Artificial Sequence
  primer
gtaaaacgacggccagttcatcatccaatgtgcatcag

SEQ ID NO: 106143 - DNA, 22 bp, Artificial Sequence
  primer
aatgcagagacccgtaagtcac

SEQ ID NO: 106144 - DNA, 19 bp, Artificial Sequence
  primer
accttgtgatctgcccacc

SEQ ID NO: 106145 - DNA, 41 bp, Artificial Sequence
  primer
gtaaaacgacggccagttgtgacctgcagtttcaataacac

SEQ ID NO: 106146 - DNA, 25 bp, Artificial Sequence
  primer
tctagaataatatgcctctgatgcc

SEQ ID NO: 106147 - DNA, 27 bp, Artificial Sequence
  primer
aaacaatctgaatatcatcactgcttc

SEQ ID NO: 106148 - DNA, 21 bp, Artificial Sequence
  primer
tgccagcaacattgaatacac

SEQ ID NO: 106149 - DNA, 37 bp, Artificial Sequence
  primer
gtaaaacgacggccagtaaagttctcgcacgcacaag

SEQ ID NO: 106150 - DNA, 37 bp, Artificial Sequence
  primer
gtaaaacgacggccagttggaacaacaggcacaaagc

SEQ ID NO: 106151 - DNA, 21 bp, Artificial Sequence
  primer
tcaagtgatccaactgccttg

SEQ ID NO: 106152 - DNA, 38 bp, Artificial Sequence
  primer
gtaaaacgacggccagtgaggttaactgtgccgaggtc

SEQ ID NO: 106153 - DNA, 21 bp, Artificial Sequence
  primer
cctgggcaacaagagagaaac

SEQ ID NO: 106154 - DNA, 41 bp, Artificial Sequence
  primer
gtaaaacgacggccagtccctaagagctaccttctctgtcc

SEQ ID NO: 106155 - DNA, 38 bp, Artificial Sequence
  primer
gtaaaacgacggccagtcgagaggagctttgtgcatac

SEQ ID NO: 106156 - DNA, 22 bp, Artificial Sequence
  primer
aactcttaccacctcctctccc

SEQ ID NO: 106157 - DNA, 40 bp, Artificial Sequence
  primer
gtaaaacgacggccagtcagaaatattatgccaccctagc

SEQ ID NO: 106158 - DNA, 27 bp, Artificial Sequence
  primer
ttatcagtacttccagttaaccaacag

SEQ ID NO: 106159 - DNA, 27 bp, Artificial Sequence
  primer
aatagctatgatcaaataaacattcgg

SEQ ID NO: 106160 - DNA, 22 bp, Artificial Sequence
  primer
tctgcatttcaaagcacttgtc

SEQ ID NO: 106161 - DNA, 35 bp, Artificial Sequence
  primer
gtaaaacgacggccagtgagaagcgagaggcaggg

SEQ ID NO: 106162 - DNA, 20 bp, Artificial Sequence
  primer
actgatgctcccagaagctg

SEQ ID NO: 106163 - DNA, 21 bp, Artificial Sequence
  primer
tagctttggagaccttgggtg

SEQ ID NO: 106164 - DNA, 22 bp, Artificial Sequence
  primer
tgagttccgaggactgaaagag

SEQ ID NO: 106165 - DNA, 18 bp, Artificial Sequence
  primer
tcaagccagcacactggg

SEQ ID NO: 106166 - DNA, 21 bp, Artificial Sequence
  primer
ctggctctttctgggtcagag

SEQ ID NO: 106167 - DNA, 38 bp, Artificial Sequence
  primer
gtaaaacgacggccagtcactgcgtccagtcataccag

SEQ ID NO: 106168 - DNA, 37 bp, Artificial Sequence
  primer
gtaaaacgacggccagtagggaagagcgcagagagac

SEQ ID NO: 106169 - DNA, 37 bp, Artificial Sequence
  primer
gtaaaacgacggccagtgaagactcgagcgacgtagg

SEQ ID NO: 106170 - DNA, 22 bp, Artificial Sequence
  primer
ctcttgctttctgcatgtatgg

SEQ ID NO: 106171 - DNA, 20 bp, Artificial Sequence
  primer
gaattgcttgaactcgaggg

SEQ ID NO: 106172 - DNA, 40 bp, Artificial Sequence
  primer
gtaaaacgacggccagttcctacaacacaggaccagagag

SEQ ID NO: 106173 - DNA, 21 bp, Artificial Sequence
  primer
ttgctgatcatttccgctatg

SEQ ID NO: 106174 - DNA, 38 bp, Artificial Sequence
  primer
gtaaaacgacggccagtggaatcagacagtgagcatcc

SEQ ID NO: 106175 - DNA, 38 bp, Artificial Sequence
  primer
gtaaaacgacggccagtggccctcaaagtctgaagatg

SEQ ID NO: 106176 - DNA, 38 bp, Artificial Sequence
  primer
gtaaaacgacggccagttttatgaaagggaggagcagc

SEQ ID NO: 106177 - DNA, 38 bp, Artificial Sequence
  primer
gtaaaacgacggccagtgtttcaagccgttgacgtttc

SEQ ID NO: 106178 - DNA, 38 bp, Artificial Sequence
  primer
gtaaaacgacggccagttaggacacacaaggcagcatc

SEQ ID NO: 106179 - DNA, 40 bp, Artificial Sequence
  primer
gtaaaacgacggccagtacagcgaaattactgcctatgac

SEQ ID NO: 106180 - DNA, 20 bp, Artificial Sequence
  primer
agcaagttaggagcgaagcc

SEQ ID NO: 106181 - DNA, 21 bp, Artificial Sequence
  primer
gagccacagacaaccacagac

SEQ ID NO: 106182 - DNA, 21 bp, Artificial Sequence
  primer
ggacaatgacagttgcctgag

SEQ ID NO: 106183 - DNA, 38 bp, Artificial Sequence
  primer
gtaaaacgacggccagtcccaatctatccaagacaccg

SEQ ID NO: 106184 - DNA, 20 bp, Artificial Sequence
  primer
ataaggccaccctttccttg

SEQ ID NO: 106185 - DNA, 38 bp, Artificial Sequence
  primer
gtaaaacgacggccagttctccctcagccagaagagac

SEQ ID NO: 106186 - DNA, 21 bp, Artificial Sequence
  primer
gattcctgtgcctcagctacc

SEQ ID NO: 106187 - DNA, 20 bp, Artificial Sequence
  primer
cagtcctcgtccttccttcc

SEQ ID NO: 106188 - DNA, 38 bp, Artificial Sequence
  primer
gtaaaacgacggccagttgagtctcagccctcagtgtg

SEQ ID NO: 106189 - DNA, 21 bp, Artificial Sequence
  primer
tgctggaatttacttccctcc

SEQ ID NO: 106190 - DNA, 39 bp, Artificial Sequence
  primer
gtaaaacgacggccagttcaggctcatctcagagtaggg

SEQ ID NO: 106191 - DNA, 38 bp, Artificial Sequence
  primer
gtaaaacgacggccagtggctgagtttgcagattcctg

SEQ ID NO: 106192 - DNA, 38 bp, Artificial Sequence
  primer
gtaaaacgacggccagtatctggagtcccaggacaaac

SEQ ID NO: 106193 - DNA, 22 bp, Artificial Sequence
  primer
aaggagactctatccagccagg

SEQ ID NO: 106194 - DNA, 20 bp, Artificial Sequence
  primer
gtctaggcagcagcacaagc

SEQ ID NO: 106195 - DNA, 21 bp, Artificial Sequence
  primer
agatgcatgatttgagcatgg

SEQ ID NO: 106196 - DNA, 21 bp, Artificial Sequence
  primer
gctttctgtcccaccaaactg

SEQ ID NO: 106197 - DNA, 37 bp, Artificial Sequence
  primer
gtaaaacgacggccagtaaagatggcagaggtgtccc

SEQ ID NO: 106198 - DNA, 36 bp, Artificial Sequence
  primer
gtaaaacgacggccagtttctggcattgtctgccac

SEQ ID NO: 106199 - DNA, 21 bp, Artificial Sequence
  primer
aatctgaaggactctgcccac

SEQ ID NO: 106200 - DNA, 38 bp, Artificial Sequence
  primer
gtaaaacgacggccagtcccactaagtattccgatgcc

SEQ ID NO: 106201 - DNA, 39 bp, Artificial Sequence
  primer
gtaaaacgacggccagttcatgtcctaaagggcagaaag

SEQ ID NO: 106202 - DNA, 41 bp, Artificial Sequence
  primer
gtaaaacgacggccagtaagctttaatggacagaatttccc

SEQ ID NO: 106203 - DNA, 20 bp, Artificial Sequence
  primer
tgtccaaggacttgtcagcc

SEQ ID NO: 106204 - DNA, 38 bp, Artificial Sequence
  primer
gtaaaacgacggccagttcagcaattaagctccttccc

SEQ ID NO: 106205 - DNA, 19 bp, Artificial Sequence
  primer
ctcgccgctgtacttgtcc

SEQ ID NO: 106206 - DNA, 21 bp, Artificial Sequence
  primer
tgccttgaagtaagcgaactg

SEQ ID NO: 106207 - DNA, 37 bp, Artificial Sequence
  primer
gtaaaacgacggccagtacttggaggagacctttggc

SEQ ID NO: 106208 - DNA, 23 bp, Artificial Sequence
  primer
agaggtccttagctatcagcagc

SEQ ID NO: 106209 - DNA, 19 bp, Artificial Sequence
  primer
gctccaggcatctagcagg

SEQ ID NO: 106210 - DNA, 21 bp, Artificial Sequence
  primer
aagcatagcaccagggttgtc

SEQ ID NO: 106211 - DNA, 41 bp, Artificial Sequence
  primer
gtaaaacgacggccagttttctcttaaggcacgaggtagtc

SEQ ID NO: 106212 - DNA, 22 bp, Artificial Sequence
  primer
acacccacaggaactgtctttc

SEQ ID NO: 106213 - DNA, 38 bp, Artificial Sequence
  primer
gtaaaacgacggccagttctgaggtatcaacagcctgg

SEQ ID NO: 106214 - DNA, 38 bp, Artificial Sequence
  primer
gtaaaacgacggccagtctccgccaactgtctgataac

SEQ ID NO: 106215 - DNA, 38 bp, Artificial Sequence
  primer
gtaaaacgacggccagtgaacctgctgggtaaacttgg

SEQ ID NO: 106216 - DNA, 20 bp, Artificial Sequence
  primer
ctgtgtttcagggtgaaggc

SEQ ID NO: 106217 - DNA, 21 bp, Artificial Sequence
  primer
ttcctttgaagagccatctgc

SEQ ID NO: 106218 - DNA, 21 bp, Artificial Sequence
  primer
gagtgaggttccctgtcttgg

SEQ ID NO: 106219 - DNA, 21 bp, Artificial Sequence
  primer
ctctgtcactggcctctggtc

SEQ ID NO: 106220 - DNA, 38 bp, Artificial Sequence
  primer
gtaaaacgacggccagtgtatttggaacgggactctgc

SEQ ID NO: 106221 - DNA, 37 bp, Artificial Sequence
  primer
gtaaaacgacggccagtctcctggaaggaacaggagg

SEQ ID NO: 106222 - DNA, 21 bp, Artificial Sequence
  primer
gcaggtaacccgactgttctg

SEQ ID NO: 106223 - DNA, 37 bp, Artificial Sequence
  primer
gtaaaacgacggccagtagcgatgcatgaggacagac

SEQ ID NO: 106224 - DNA, 37 bp, Artificial Sequence
  primer
gtaaaacgacggccagtagcacgtgcagctctgactc

SEQ ID NO: 106225 - DNA, 21 bp, Artificial Sequence
  primer
gcccaggagtgagtcaaattc

SEQ ID NO: 106226 - DNA, 37 bp, Artificial Sequence
  primer
gtaaaacgacggccagtctcagaatcacaagctcggc

SEQ ID NO: 106227 - DNA, 38 bp, Artificial Sequence
  primer
gtaaaacgacggccagtgtcgatcttgagttcgtccag

SEQ ID NO: 106228 - DNA, 21 bp, Artificial Sequence
  primer
acacttcccgcatcttacagg

SEQ ID NO: 106229 - DNA, 20 bp, Artificial Sequence
  primer
ctctccggtgtttcggtctc

SEQ ID NO: 106230 - DNA, 20 bp, Artificial Sequence
  primer
atccaaaggtgagtggaggg

SEQ ID NO: 106231 - DNA, 21 bp, Artificial Sequence
  primer
gctccaagagaaggaagggac

SEQ ID NO: 106232 - DNA, 39 bp, Artificial Sequence
  primer
gtaaaacgacggccagttgacccacctactccaactgtc

SEQ ID NO: 106233 - DNA, 21 bp, Artificial Sequence
  primer
agtcttcctggtccctaagcc

SEQ ID NO: 106234 - DNA, 35 bp, Artificial Sequence
  primer
gtaaaacgacggccagtcaggcacagtggcagatg

SEQ ID NO: 106235 - DNA, 21 bp, Artificial Sequence
  primer
agagccagtaaggcaggacag

SEQ ID NO: 106236 - DNA, 20 bp, Artificial Sequence
  primer
gaggtcgggaagaggatgag

SEQ ID NO: 106237 - DNA, 38 bp, Artificial Sequence
  primer
gtaaaacgacggccagttgtaaataggagggtgggtgc

SEQ ID NO: 106238 - DNA, 38 bp, Artificial Sequence
  primer
gtaaaacgacggccagtcaggtgctcaaacctacctcc

SEQ ID NO: 106239 - DNA, 38 bp, Artificial Sequence
  primer
gtaaaacgacggccagttatttcaggaaaggagggtgg

SEQ ID NO: 106240 - DNA, 19 bp, Artificial Sequence
  primer
cccattcacagtgcaccag

SEQ ID NO: 106241 - DNA, 21 bp, Artificial Sequence
  primer
agaagagacaggtgaggaccc

SEQ ID NO: 106242 - DNA, 22 bp, Artificial Sequence
  primer
catgctagaaagaggatctggg

SEQ ID NO: 106243 - DNA, 21 bp, Artificial Sequence
  primer
cctaggcccagcttatccttc

SEQ ID NO: 106244 - DNA, 38 bp, Artificial Sequence
  primer
gtaaaacgacggccagttgaagattctgaggccaaagg

SEQ ID NO: 106245 - DNA, 38 bp, Artificial Sequence
  primer
gtaaaacgacggccagttctcaagtgatcctcccactg

SEQ ID NO: 106246 - DNA, 21 bp, Artificial Sequence
  primer
acacactctggcaactggatg

SEQ ID NO: 106247 - DNA, 21 bp, Artificial Sequence
  primer
ttcagcttctctctcccttgg

SEQ ID NO: 106248 - DNA, 36 bp, Artificial Sequence
  primer
gtaaaacgacggccagtgcagttgtcagcatttggg

SEQ ID NO: 106249 - DNA, 38 bp, Artificial Sequence
  primer
gtaaaacgacggccagtacttgaaacgtccttcccttg

SEQ ID NO: 106250 - DNA, 39 bp, Artificial Sequence
  primer
gtaaaacgacggccagtttctgtaacaaagcagcgagac

SEQ ID NO: 106251 - DNA, 37 bp, Artificial Sequence
  primer
gtaaaacgacggccagttgattcactgaacaggccac

SEQ ID NO: 106252 - DNA, 19 bp, Artificial Sequence
  primer
agacctcatgggtgcttgg

SEQ ID NO: 106253 - DNA, 38 bp, Artificial Sequence
  primer
gtaaaacgacggccagtggtcaaagatgagcccttcag

SEQ ID NO: 106254 - DNA, 21 bp, Artificial Sequence
  primer
gaaagtggcatgtctggtctg

SEQ ID NO: 106255 - DNA, 20 bp, Artificial Sequence
  primer
aggctggacacctgcatctc

SEQ ID NO: 106256 - DNA, 21 bp, Artificial Sequence
  primer
tggtatcagctggcttcattc

SEQ ID NO: 106257 - DNA, 21 bp, Artificial Sequence
  primer
atttcagatgaacccagaggg

SEQ ID NO: 106258 - DNA, 20 bp, Artificial Sequence
  primer
cctcctcccatcactctttg

SEQ ID NO: 106259 - DNA, 38 bp, Artificial Sequence
  primer
gtaaaacgacggccagttctaggccgctgaaataggag

SEQ ID NO: 106260 - DNA, 21 bp, Artificial Sequence
  primer
gcagggaagcagattcagaag

SEQ ID NO: 106261 - DNA, 38 bp, Artificial Sequence
  primer
gtaaaacgacggccagtggatctaaactgcagggaagc

SEQ ID NO: 106262 - DNA, 39 bp, Artificial Sequence
  primer
gtaaaacgacggccagttctaaattcacagatttggcgg

SEQ ID NO: 106263 - DNA, 21 bp, Artificial Sequence
  primer
gagggcaacgagcagtttaag

SEQ ID NO: 106264 - DNA, 27 bp, Artificial Sequence
  primer
ttcacttaattctcccataactctgtg

SEQ ID NO: 106265 - DNA, 37 bp, Artificial Sequence
  primer
gtaaaacgacggccagtccctgccctttctttctctc

SEQ ID NO: 106266 - DNA, 24 bp, Artificial Sequence
  primer
cagaagaggtagtgcggtagtagc

SEQ ID NO: 106267 - DNA, 38 bp, Artificial Sequence
  primer
gtaaaacgacggccagtaattcacgccataacagttgc

SEQ ID NO: 106268 - DNA, 44 bp, Artificial Sequence
  primer
gtaaaacgacggccagtcaccataaatgaatctataaacagaca

SEQ ID NO: 106269 - DNA, 38 bp, Artificial Sequence
  primer
gtaaaacgacggccagtgacaggcaaataacgcctttg

SEQ ID NO: 106270 - DNA, 21 bp, Artificial Sequence
  primer
tatcccatgaagcctccattc

SEQ ID NO: 106271 - DNA, 38 bp, Artificial Sequence
  primer
gtaaaacgacggccagttgaagagatgtgtctgggtgc

SEQ ID NO: 106272 - DNA, 20 bp, Artificial Sequence
  primer
catggagcttcttcctgcac

SEQ ID NO: 106273 - DNA, 21 bp, Artificial Sequence
  primer
aactggtgcaacaatttctcc

SEQ ID NO: 106274 - DNA, 22 bp, Artificial Sequence
  primer
ggaccatgacgaattacttccc

SEQ ID NO: 106275 - DNA, 38 bp, Artificial Sequence
  primer
gtaaaacgacggccagtttctctagcagcaacagccag

SEQ ID NO: 106276 - DNA, 21 bp, Artificial Sequence
  primer
ggtcaggtagccctaatgctg

SEQ ID NO: 106277 - DNA, 37 bp, Artificial Sequence
  primer
gtaaaacgacggccagtttgtggttacctctgggtgg

SEQ ID NO: 106278 - DNA, 21 bp, Artificial Sequence
  primer
tatggccatcaggaggatagg

SEQ ID NO: 106279 - DNA, 38 bp, Artificial Sequence
  primer
gtaaaacgacggccagttttagggtgactgacaagccc

SEQ ID NO: 106280 - DNA, 21 bp, Artificial Sequence
  primer
agaaatcccacctcatccctc

SEQ ID NO: 106281 - DNA, 21 bp, Artificial Sequence
  primer
agcatacccagaccctccttc

SEQ ID NO: 106282 - DNA, 21 bp, Artificial Sequence
  primer
ttgcaagtatctggacatccc

SEQ ID NO: 106283 - DNA, 38 bp, Artificial Sequence
  primer
gtaaaacgacggccagttataagctccactgggcaagg

SEQ ID NO: 106284 - DNA, 21 bp, Artificial Sequence
  primer
ctttagtggctgagcattggg

SEQ ID NO: 106285 - DNA, 20 bp, Artificial Sequence
  primer
cagagtccatcgctctccac

SEQ ID NO: 106286 - DNA, 36 bp, Artificial Sequence
  primer
gtaaaacgacggccagtccctctcccagggttgaag

SEQ ID NO: 106287 - DNA, 38 bp, Artificial Sequence
  primer
gtaaaacgacggccagtagcaaaggaagacagacaccc

SEQ ID NO: 106288 - DNA, 38 bp, Artificial Sequence
  primer
gtaaaacgacggccagtaaatggtttaggcagggtagg

SEQ ID NO: 106289 - DNA, 21 bp, Artificial Sequence
  primer
gactggaatgtagccagcctc

SEQ ID NO: 106290 - DNA, 38 bp, Artificial Sequence
  primer
gtaaaacgacggccagtagcttgataatttgggcctgc

SEQ ID NO: 106291 - DNA, 21 bp, Artificial Sequence
  primer
ccttagttgctagggcagtgg

SEQ ID NO: 106292 - DNA, 38 bp, Artificial Sequence
  primer
gtaaaacgacggccagtagatccttccttcgacagcac

SEQ ID NO: 106293 - DNA, 38 bp, Artificial Sequence
  primer
gtaaaacgacggccagtttccttccttctagctttggc

SEQ ID NO: 106294 - DNA, 24 bp, Artificial Sequence
  primer
gcaggcttagagaagaaagtgatg

SEQ ID NO: 106295 - DNA, 22 bp, Artificial Sequence
  primer
tgcaacctaaagtggtagttgg

SEQ ID NO: 106296 - DNA, 22 bp, Artificial Sequence
  primer
tgaaagcaatgtctgtgagcag

SEQ ID NO: 106297 - DNA, 20 bp, Artificial Sequence
  primer
atgttggcaggtctctccag

SEQ ID NO: 106298 - DNA, 37 bp, Artificial Sequence
  primer
gtaaaacgacggccagtcctttctaggtgccatggtg

SEQ ID NO: 106299 - DNA, 20 bp, Artificial Sequence
  primer
ttctccaccctcttccttgg

SEQ ID NO: 106300 - DNA, 21 bp, Artificial Sequence
  primer
aagacaccaaggaggcaagag

SEQ ID NO: 106301 - DNA, 21 bp, Artificial Sequence
  primer
gtcccttctcaactctgagcc

SEQ ID NO: 106302 - DNA, 38 bp, Artificial Sequence
  primer
gtaaaacgacggccagtagggtctgtgtaaatggcacc

SEQ ID NO: 106303 - DNA, 21 bp, Artificial Sequence
  primer
actctggaacctttgattccg

SEQ ID NO: 106304 - DNA, 21 bp, Artificial Sequence
  primer
tgatctgggtttcagtccctc

SEQ ID NO: 106305 - DNA, 20 bp, Artificial Sequence
  primer
gaacacaccacagcctccag

SEQ ID NO: 106306 - DNA, 21 bp, Artificial Sequence
  primer
agaggtgcggaggagtaagag

SEQ ID NO: 106307 - DNA, 21 bp, Artificial Sequence
  primer
gctaattggatcacctctccg

SEQ ID NO: 106308 - DNA, 21 bp, Artificial Sequence
  primer
ctccctacccaccatcatctc

SEQ ID NO: 106309 - DNA, 38 bp, Artificial Sequence
  primer
gtaaaacgacggccagtagcactgggagactgtggaag

SEQ ID NO: 106310 - DNA, 20 bp, Artificial Sequence
  primer
gggacctcaaggcacacatc

SEQ ID NO: 106311 - DNA, 21 bp, Artificial Sequence
  primer
cccatgaagaaagatgccaag

SEQ ID NO: 106312 - DNA, 21 bp, Artificial Sequence
  primer
acttggttcccagatttgcag

SEQ ID NO: 106313 - DNA, 38 bp, Artificial Sequence
  primer
gtaaaacgacggccagtacagggcagagcaggacttag

SEQ ID NO: 106314 - DNA, 38 bp, Artificial Sequence
  primer
gtaaaacgacggccagtcaaagacccacagcagacaag

SEQ ID NO: 106315 - DNA, 21 bp, Artificial Sequence
  primer
caagtttctaacgggagggtg

SEQ ID NO: 106316 - DNA, 21 bp, Artificial Sequence
  primer
gaccttgctgttcttccaacc

SEQ ID NO: 106317 - DNA, 38 bp, Artificial Sequence
  primer
gtaaaacgacggccagttcaaatcagaaacatgagggc

SEQ ID NO: 106318 - DNA, 21 bp, Artificial Sequence
  primer
atgggcactgattctgtttgg

SEQ ID NO: 106319 - DNA, 19 bp, Artificial Sequence
  primer
attccagggaagggtggac

SEQ ID NO: 106320 - DNA, 37 bp, Artificial Sequence
  primer
gtaaaacgacggccagtccctgaaagtctcggtcctc

SEQ ID NO: 106321 - DNA, 39 bp, Artificial Sequence
  primer
gtaaaacgacggccagtcatcctgtgttggaacaaactg

SEQ ID NO: 106322 - DNA, 38 bp, Artificial Sequence
  primer
gtaaaacgacggccagtgagccacttagtgcagggaac

SEQ ID NO: 106323 - DNA, 38 bp, Artificial Sequence
  primer
gtaaaacgacggccagtagtcagtggtgcattcgtagc

SEQ ID NO: 106324 - DNA, 20 bp, Artificial Sequence
  primer
aagttgcagtgagccgagat

SEQ ID NO: 106325 - DNA, 21 bp, Artificial Sequence
  primer
gtttggctgagtgccattatc

SEQ ID NO: 106326 - DNA, 20 bp, Artificial Sequence
  primer
ggaaggccctgtcctcatag

SEQ ID NO: 106327 - DNA, 38 bp, Artificial Sequence
  primer
gtaaaacgacggccagttttaaatgcaaacctccctcc

SEQ ID NO: 106328 - DNA, 40 bp, Artificial Sequence
  primer
gtaaaacgacggccagtttgacaaggagcatttaaaggtg

SEQ ID NO: 106329 - DNA, 37 bp, Artificial Sequence
  primer
gtaaaacgacggccagtgacaaggcgaggtctcacag

SEQ ID NO: 106330 - DNA, 44 bp, Artificial Sequence
  primer
gtaaaacgacggccagttcagttattgtgactgatcactacttc

SEQ ID NO: 106331 - DNA, 38 bp, Artificial Sequence
  primer
gtaaaacgacggccagtaaatcagtgccaggaacacac

SEQ ID NO: 106332 - DNA, 21 bp, Artificial Sequence
  primer
tggagaccttcctatccatcc

SEQ ID NO: 106333 - DNA, 37 bp, Artificial Sequence
  primer
gtaaaacgacggccagtgattccttgccactgtctgc

SEQ ID NO: 106334 - DNA, 20 bp, Artificial Sequence
  primer
gcagctgaggaaaggagagg

SEQ ID NO: 106335 - DNA, 38 bp, Artificial Sequence
  primer
gtaaaacgacggccagtagaaggctccacctccctaac

SEQ ID NO: 106336 - DNA, 23 bp, Artificial Sequence
  primer
ctcaatcccagttctctaaccac

SEQ ID NO: 106337 - DNA, 36 bp, Artificial Sequence
  primer
gtaaaacgacggccagtctcagcagccaacaagcag

SEQ ID NO: 106338 - DNA, 41 bp, Artificial Sequence
  primer
gtaaaacgacggccagttccctagaagcatttaaggagagg

SEQ ID NO: 106339 - DNA, 23 bp, Artificial Sequence
  primer
tctgtgtgcagagtcttaggctt

SEQ ID NO: 106340 - DNA, 40 bp, Artificial Sequence
  primer
gtaaaacgacggccagtcatcacagatcctcatagccttg

SEQ ID NO: 106341 - DNA, 38 bp, Artificial Sequence
  primer
gtaaaacgacggccagtcacctgccactgctctgtatc

SEQ ID NO: 106342 - DNA, 22 bp, Artificial Sequence
  primer
tgaactgcacaatttgaactgg

SEQ ID NO: 106343 - DNA, 38 bp, Artificial Sequence
  primer
gtaaaacgacggccagttgctcaactttgagagggagg

SEQ ID NO: 106344 - DNA, 21 bp, Artificial Sequence
  primer
cttgtctgtgaatcaccaggg

SEQ ID NO: 106345 - DNA, 38 bp, Artificial Sequence
  primer
gtaaaacgacggccagttgaggaaccaccaagatcaag

SEQ ID NO: 106346 - DNA, 38 bp, Artificial Sequence
  primer
gtaaaacgacggccagtagagggctgattaagggcttg

SEQ ID NO: 106347 - DNA, 20 bp, Artificial Sequence
  primer
cgtctcttcccttctcccac

SEQ ID NO: 106348 - DNA, 38 bp, Artificial Sequence
  primer
gtaaaacgacggccagtgcacgcgtagtcacaatcaag

SEQ ID NO: 106349 - DNA, 39 bp, Artificial Sequence
  primer
gtaaaacgacggccagtccagctatgtccaacaggaaac

SEQ ID NO: 106350 - DNA, 38 bp, Artificial Sequence
  primer
gtaaaacgacggccagttaacctgtggtgcagtgaagc

SEQ ID NO: 106351 - DNA, 21 bp, Artificial Sequence
  primer
aaatgtagtcgactggtcccg

SEQ ID NO: 106352 - DNA, 38 bp, Artificial Sequence
  primer
gtaaaacgacggccagtcagaccaaactggaagggaag

SEQ ID NO: 106353 - DNA, 38 bp, Artificial Sequence
  primer
gtaaaacgacggccagttggtgactcattgctctttcc

SEQ ID NO: 106354 - DNA, 22 bp, Artificial Sequence
  primer
gggactggactccctcatttac

SEQ ID NO: 106355 - DNA, 43 bp, Artificial Sequence
  primer
gtaaaacgacggccagtgcactacatagatcattccctacatc

SEQ ID NO: 106356 - DNA, 21 bp, Artificial Sequence
  primer
tggcagaaattgtgtaatggg

SEQ ID NO: 106357 - DNA, 38 bp, Artificial Sequence
  primer
gtaaaacgacggccagtgacagctagaaggcaggcagt

SEQ ID NO: 106358 - DNA, 24 bp, Artificial Sequence
  primer
ttagtctacacccaatacaggtgg

SEQ ID NO: 106359 - DNA, 42 bp, Artificial Sequence
  primer
gtaaaacgacggccagtgcaaacagctttaaaggagtagttg

SEQ ID NO: 106360 - DNA, 21 bp, Artificial Sequence
  primer
gtacctctgctgccaacaacc

SEQ ID NO: 106361 - DNA, 38 bp, Artificial Sequence
  primer
gtaaaacgacggccagtcaaactttcagcttgcctgag

SEQ ID NO: 106362 - DNA, 40 bp, Artificial Sequence
  primer
gtaaaacgacggccagtcacataagaagctcatggaatcg

SEQ ID NO: 106363 - DNA, 42 bp, Artificial Sequence
  primer
gtaaaacgacggccagttgtaatttgaggagtttcatttgag

SEQ ID NO: 106364 - DNA, 21 bp, Artificial Sequence
  primer
gggcaacaagagtgaaactcc

SEQ ID NO: 106365 - DNA, 20 bp, Artificial Sequence
  primer
ctgggcaacacagagagacc

SEQ ID NO: 106366 - DNA, 18 bp, Artificial Sequence
  primer
gtgagccacagcacccag

SEQ ID NO: 106367 - DNA, 24 bp, Artificial Sequence
  primer
tcaaagatcttaccatgagcagtg

SEQ ID NO: 106368 - DNA, 21 bp, Artificial Sequence
  primer
tagcaaatggatggctcattg

SEQ ID NO: 106369 - DNA, 21 bp, Artificial Sequence
  primer
cttctatgttgctcaggctgg

SEQ ID NO: 106370 - DNA, 21 bp, Artificial Sequence
  primer
ttccaaacagctttcagcaac

SEQ ID NO: 106371 - DNA, 37 bp, Artificial Sequence
  primer
gtaaaacgacggccagtgtcctgtagcttcacgcagg

SEQ ID NO: 106372 - DNA, 37 bp, Artificial Sequence
  primer
gtaaaacgacggccagtggtggttgccaaatcctctg

SEQ ID NO: 106373 - DNA, 21 bp, Artificial Sequence
  primer
cctacagggcctatgggacag

SEQ ID NO: 106374 - DNA, 38 bp, Artificial Sequence
  primer
gtaaaacgacggccagtctggtctaatccacggtttgc

SEQ ID NO: 106375 - DNA, 38 bp, Artificial Sequence
  primer
gtaaaacgacggccagtaaatgccggatcagcattaag

SEQ ID NO: 106376 - DNA, 21 bp, Artificial Sequence
  primer
tcctggtgatagaaaccatgc

SEQ ID NO: 106377 - DNA, 38 bp, Artificial Sequence
  primer
gtaaaacgacggccagttgccacgtttctgtcttcttg

SEQ ID NO: 106378 - DNA, 21 bp, Artificial Sequence
  primer
ctgcagctgtgttagccagac

SEQ ID NO: 106379 - DNA, 21 bp, Artificial Sequence
  primer
actgcagccttaaactcctgg

SEQ ID NO: 106380 - DNA, 37 bp, Artificial Sequence
  primer
gtaaaacgacggccagtagggaagtccctgctctgac

SEQ ID NO: 106381 - DNA, 21 bp, Artificial Sequence
  primer
gagctgattagggaagaaggg

SEQ ID NO: 106382 - DNA, 20 bp, Artificial Sequence
  primer
aggcaggagagctgcttgag

SEQ ID NO: 106383 - DNA, 38 bp, Artificial Sequence
  primer
gtaaaacgacggccagtgaagagctggttgaagaaccg

SEQ ID NO: 106384 - DNA, 21 bp, Artificial Sequence
  primer
gtgggtccaaaggatatgagg

SEQ ID NO: 106385 - DNA, 38 bp, Artificial Sequence
  primer
gtaaaacgacggccagtctagagcaagagaacggtggg

SEQ ID NO: 106386 - DNA, 21 bp, Artificial Sequence
  primer
ttgacctccttgattggaagg

SEQ ID NO: 106387 - DNA, 21 bp, Artificial Sequence
  primer
aggttctctgttgaaggcagg

SEQ ID NO: 106388 - DNA, 38 bp, Artificial Sequence
  primer
gtaaaacgacggccagtaaggatgccttgagaaaggag

SEQ ID NO: 106389 - DNA, 21 bp, Artificial Sequence
  primer
ctgtgtgtctgtgacagcagg

SEQ ID NO: 106390 - DNA, 21 bp, Artificial Sequence
  primer
gaactgccatgtctgacctcc

SEQ ID NO: 106391 - DNA, 21 bp, Artificial Sequence
  primer
agggtggtagctgagatgcag

SEQ ID NO: 106392 - DNA, 21 bp, Artificial Sequence
  primer
agatccagacagaagaggccc

SEQ ID NO: 106393 - DNA, 38 bp, Artificial Sequence
  primer
gtaaaacgacggccagtaaggtgtgagctgagaaaggg

SEQ ID NO: 106394 - DNA, 21 bp, Artificial Sequence
  primer
acacacgtcgctgcttcttac

SEQ ID NO: 106395 - DNA, 36 bp, Artificial Sequence
  primer
gtaaaacgacggccagtcaaaggctgggagggaatg

SEQ ID NO: 106396 - DNA, 23 bp, Artificial Sequence
  primer
gctgcttatagaggcaactatcg

SEQ ID NO: 106397 - DNA, 38 bp, Artificial Sequence
  primer
gtaaaacgacggccagttaggagtcagagcttgggtgg

SEQ ID NO: 106398 - DNA, 20 bp, Artificial Sequence
  primer
ccaaggaagcactggagaag

SEQ ID NO: 106399 - DNA, 19 bp, Artificial Sequence
  primer
acaggagggcactggtttg

SEQ ID NO: 106400 - DNA, 36 bp, Artificial Sequence
  primer
gtaaaacgacggccagtgtgggagatgtagcgcgag

SEQ ID NO: 106401 - DNA, 21 bp, Artificial Sequence
  primer
ctaaggcccttcccatttctg

SEQ ID NO: 106402 - DNA, 36 bp, Artificial Sequence
  primer
gtaaaacgacggccagttgggaaagggctgacagaa

SEQ ID NO: 106403 - DNA, 21 bp, Artificial Sequence
  primer
gaacctggatggtggaagttg

SEQ ID NO: 106404 - DNA, 39 bp, Artificial Sequence
  primer
gtaaaacgacggccagtcaaggcatttatctgctccaag

SEQ ID NO: 106405 - DNA, 38 bp, Artificial Sequence
  primer
gtaaaacgacggccagtataagcaaggtttctggcagc

SEQ ID NO: 106406 - DNA, 38 bp, Artificial Sequence
  primer
gtaaaacgacggccagtggaaccacacagtcctcattc

SEQ ID NO: 106407 - DNA, 24 bp, Artificial Sequence
  primer
tgtggtctgtgttatgtacaaggc

SEQ ID NO: 106408 - DNA, 23 bp, Artificial Sequence
  primer
cagagtcccaatagagacaaggg

SEQ ID NO: 106409 - DNA, 39 bp, Artificial Sequence
  primer
gtaaaacgacggccagttgctgcatttgaagcctcttag

SEQ ID NO: 106410 - DNA, 45 bp, Artificial Sequence
  primer
gtaaaacgacggccagttctgctggtttatacagatattcttcac

SEQ ID NO: 106411 - DNA, 21 bp, Artificial Sequence
  primer
tcaggtcaagaaatgccagtg

SEQ ID NO: 106412 - DNA, 18 bp, Artificial Sequence
  primer
gaccctgcatcatggctg

SEQ ID NO: 106413 - DNA, 39 bp, Artificial Sequence
  primer
gtaaaacgacggccagtaaacaaaggctggagtttgaag

SEQ ID NO: 106414 - DNA, 38 bp, Artificial Sequence
  primer
gtaaaacgacggccagtgggacagaggaaggaagaatc

SEQ ID NO: 106415 - DNA, 41 bp, Artificial Sequence
  primer
gtaaaacgacggccagtgaggtccttagttgttccactacc

SEQ ID NO: 106416 - DNA, 38 bp, Artificial Sequence
  primer
gtaaaacgacggccagtcaaggtaaatgcccattaggg

SEQ ID NO: 106417 - DNA, 22 bp, Artificial Sequence
  primer
tgaatgggaatgaaatgaaacc

SEQ ID NO: 106418 - DNA, 39 bp, Artificial Sequence
  primer
gtaaaacgacggccagttctgaaagagacaaacttccgc

SEQ ID NO: 106419 - DNA, 26 bp, Artificial Sequence
  primer
cgtttaaacagctagattaacaaggc

SEQ ID NO: 106420 - DNA, 27 bp, Artificial Sequence
  primer
tctgaacctcaacaagtataatcaatc

SEQ ID NO: 106421 - DNA, 22 bp, Artificial Sequence
  primer
caggtgatgctgctgttctatg

SEQ ID NO: 106422 - DNA, 26 bp, Artificial Sequence
  primer
tcactatttaaacccagactgacctc

SEQ ID NO: 106423 - DNA, 39 bp, Artificial Sequence
  primer
gtaaaacgacggccagtcgaatgaatgttgatgatttcc

SEQ ID NO: 106424 - DNA, 38 bp, Artificial Sequence
  primer
gtaaaacgacggccagtaagtggcagaagacaaggcac

SEQ ID NO: 106425 - DNA, 38 bp, Artificial Sequence
  primer
gtaaaacgacggccagtgcaatatggaagtctccctgc

SEQ ID NO: 106426 - DNA, 38 bp, Artificial Sequence
  primer
gtaaaacgacggccagtgtattccagatttcgggaggg

SEQ ID NO: 106427 - DNA, 43 bp, Artificial Sequence
  primer
gtaaaacgacggccagtaaggaggcagataatacataggtttc

SEQ ID NO: 106428 - DNA, 38 bp, Artificial Sequence
  primer
gtaaaacgacggccagtcaagcacgtgccttatctttg

SEQ ID NO: 106429 - DNA, 38 bp, Artificial Sequence
  primer
gtaaaacgacggccagtcgattcaccatttctgtcagc

SEQ ID NO: 106430 - DNA, 24 bp, Artificial Sequence
  primer
tcagattcaaaggaatgacaacag

SEQ ID NO: 106431 - DNA, 38 bp, Artificial Sequence
  primer
gtaaaacgacggccagtgatatgatgcttgggatttgc

SEQ ID NO: 106432 - DNA, 39 bp, Artificial Sequence
  primer
gtaaaacgacggccagtaatcaatgctggcaaagaagtc

SEQ ID NO: 106433 - DNA, 42 bp, Artificial Sequence
  primer
gtaaaacgacggccagttgcaagagtaaataggtttccagac

SEQ ID NO: 106434 - DNA, 22 bp, Artificial Sequence
  primer
aggtctctcacaaactgaagcc

SEQ ID NO: 106435 - DNA, 36 bp, Artificial Sequence
  primer
gtaaaacgacggccagtaaccctcacagggcacaac

SEQ ID NO: 106436 - DNA, 18 bp, Artificial Sequence
  primer
ctcaatgaaagcccgctg

SEQ ID NO: 106437 - DNA, 43 bp, Artificial Sequence
  primer
gtaaaacgacggccagttctggcagagtaagctctattatcag

SEQ ID NO: 106438 - DNA, 21 bp, Artificial Sequence
  primer
gggaacaaggataggaagctg

SEQ ID NO: 106439 - DNA, 39 bp, Artificial Sequence
  primer
gtaaaacgacggccagttgcacagtagatgagaaggtgg

SEQ ID NO: 106440 - DNA, 39 bp, Artificial Sequence
  primer
gtaaaacgacggccagtcagttactttccttggctccag

SEQ ID NO: 106441 - DNA, 20 bp, Artificial Sequence
  primer
caacagagcaaggctccatc

SEQ ID NO: 106442 - DNA, 38 bp, Artificial Sequence
  primer
gtaaaacgacggccagtggctggtcaggaagaattcac

SEQ ID NO: 106443 - DNA, 36 bp, Artificial Sequence
  primer
gtaaaacgacggccagtacatcgcttaggtgggctg

SEQ ID NO: 106444 - DNA, 38 bp, Artificial Sequence
  primer
gtaaaacgacggccagtatttcaaacatctgccatccc

SEQ ID NO: 106445 - DNA, 25 bp, Artificial Sequence
  primer
tctggaatagcagaatgaagatttg

SEQ ID NO: 106446 - DNA, 36 bp, Artificial Sequence
  primer
gtaaaacgacggccagttcgtagggacagggtttcg

SEQ ID NO: 106447 - DNA, 21 bp, Artificial Sequence
  primer
aactcctgagctaaatccgcc

SEQ ID NO: 106448 - DNA, 38 bp, Artificial Sequence
  primer
gtaaaacgacggccagttggatctgattgtggagaagc

SEQ ID NO: 106449 - DNA, 21 bp, Artificial Sequence
  primer
ttattacgcccaccaatgaaa

SEQ ID NO: 106450 - DNA, 39 bp, Artificial Sequence
  primer
gtaaaacgacggccagttgctcaaggttcaggttaaagc

SEQ ID NO: 106451 - DNA, 38 bp, Artificial Sequence; identical to SEQ ID NO: 106431
  primer

SEQ ID NO: 106452 - DNA, 38 bp, Artificial Sequence
  primer
gtaaaacgacggccagttaggttccttcgtcgaccttg

SEQ ID NO: 106453 - DNA, 38 bp, Artificial Sequence
  primer
gtaaaacgacggccagtgggacggatggataatgtgag

SEQ ID NO: 106454 - DNA, 20 bp, Artificial Sequence
  primer
aacagccctgcttctccttg

SEQ ID NO: 106455 - DNA, 21 bp, Artificial Sequence
  primer
tcaccatcaggaaggatgaag

SEQ ID NO: 106456 - DNA, 19 bp, Artificial Sequence
  primer
ccacagaggacgatgaccc

SEQ ID NO: 106457 - DNA, 38 bp, Artificial Sequence
  primer
gtaaaacgacggccagtaactaccctgctcacccacag

SEQ ID NO: 106458 - DNA, 38 bp, Artificial Sequence
  primer
gtaaaacgacggccagtacaccaatgcccataaacctc

SEQ ID NO: 106459 - DNA, 39 bp, Artificial Sequence
  primer
gtaaaacgacggccagtcgtgactcttaagtgccaatcc

SEQ ID NO: 106460 - DNA, 38 bp, Artificial Sequence
  primer
gtaaaacgacggccagtgctctgaaataagctcagccc

SEQ ID NO: 106461 - DNA, 38 bp, Artificial Sequence
  primer
gtaaaacgacggccagtgctgaaagccattcaatgagg

SEQ ID NO: 106462 - DNA, 21 bp, Artificial Sequence
  primer
aagggagccctaggagttcag

SEQ ID NO: 106463 - DNA, 38 bp, Artificial Sequence
  primer
gtaaaacgacggccagtccctcagaaaggacagtgctc

SEQ ID NO: 106464 - DNA, 21 bp, Artificial Sequence
  primer
ccctgggatatttactgtggc

SEQ ID NO: 106465 - DNA, 38 bp, Artificial Sequence
  primer
gtaaaacgacggccagtaaaggcgttgaagaggaagtg

SEQ ID NO: 106466 - DNA, 37 bp, Artificial Sequence
  primer
gtaaaacgacggccagtgacagtgacgccagggtaag

SEQ ID NO: 106467 - DNA, 37 bp, Artificial Sequence
  primer
gtaaaacgacggccagtgccagtctctggatggacag

SEQ ID NO: 106468 - DNA, 21 bp, Artificial Sequence
  primer
ggttctgacaaccagccagac

SEQ ID NO: 106469 - DNA, 22 bp, Artificial Sequence
  primer
gactcagacaagagggcaagtg

SEQ ID NO: 106470 - DNA, 21 bp, Artificial Sequence
  primer
ccagatgaatggctgtgtgtg

SEQ ID NO: 106471 - DNA, 38 bp, Artificial Sequence
  primer
gtaaaacgacggccagtgggagtggagaagatgctgag

SEQ ID NO: 106472 - DNA, 38 bp, Artificial Sequence
  primer
gtaaaacgacggccagtatggatggtctgtcttctggg

SEQ ID NO: 106473 - DNA, 21 bp, Artificial Sequence
  primer
cttgaaccttcccaattctcg

SEQ ID NO: 106474 - DNA, 20 bp, Artificial Sequence
  primer
ctgcaggtggctcagtgttc

SEQ ID NO: 106475 - DNA, 21 bp, Artificial Sequence
  primer
ctgcaactgctctctttgacc

SEQ ID NO: 106476 - DNA, 38 bp, Artificial Sequence
  primer
gtaaaacgacggccagtcctttccagcagtaggcattc

SEQ ID NO: 106477 - DNA, 21 bp, Artificial Sequence
  primer
ctctgtgcctgtggatagagc

SEQ ID NO: 106478 - DNA, 20 bp, Artificial Sequence
  primer
ggaacacgagtagcagccag

SEQ ID NO: 106479 - DNA, 19 bp, Artificial Sequence
  primer
ctcaaagctctggcaggtg

SEQ ID NO: 106480 - DNA, 21 bp, Artificial Sequence
  primer
atggatggtctgtcttctggg

SEQ ID NO: 106481 - DNA, 38 bp, Artificial Sequence
  primer
gtaaaacgacggccagtcaggtggaagacagactcctg

SEQ ID NO: 106482 - DNA, 21 bp, Artificial Sequence
  primer
ccatttccacctctcatcctc

SEQ ID NO: 106483 - DNA, 38 bp, Artificial Sequence
  primer
gtaaaacgacggccagtacagaggcccttcttctctcc

SEQ ID NO: 106484 - DNA, 21 bp, Artificial Sequence
  primer
accaacaggtgaacgtgactg

SEQ ID NO: 106485 - DNA, 21 bp, Artificial Sequence
  primer
caaagcagatacccacaagcc

SEQ ID NO: 106486 - DNA, 38 bp, Artificial Sequence
  primer
gtaaaacgacggccagtccttgctcatagccagcactc

SEQ ID NO: 106487 - DNA, 20 bp, Artificial Sequence
  primer
aaagaggacatcccactgcc

SEQ ID NO: 106488 - DNA, 38 bp, Artificial Sequence
  primer
gtaaaacgacggccagtagacagccagtttggagttgg

SEQ ID NO: 106489 - DNA, 21 bp, Artificial Sequence
  primer
caggtctccttccctgacatc

SEQ ID NO: 106490 - DNA, 38 bp, Artificial Sequence
  primer
gtaaaacgacggccagtacaccaaggttgggacatgag

SEQ ID NO: 106491 - DNA, 38 bp, Artificial Sequence
  primer
gtaaaacgacggccagtcatatgacgcttacctctggg

SEQ ID NO: 106492 - DNA, 38 bp, Artificial Sequence
  primer
gtaaaacgacggccagtgacctcagggtatgggtcatc

SEQ ID NO: 106493 - DNA, 21 bp, Artificial Sequence
  primer
taggatctgctccaaaggtgg

SEQ ID NO: 106494 - DNA, 38 bp, Artificial Sequence
  primer
gtaaaacgacggccagttgattagcacctgtctctcgc

SEQ ID NO: 106495 - DNA, 38 bp, Artificial Sequence
  primer
gtaaaacgacggccagtgcacacaggtcccttaagtcc

SEQ ID NO: 106496 - DNA, 21 bp, Artificial Sequence
  primer
ggttgaaatgtgtgtgatgcc

SEQ ID NO: 106497 - DNA, 38 bp, Artificial Sequence
  primer
gtaaaacgacggccagtccaggagtttaagggatgctg

SEQ ID NO: 106498 - DNA, 21 bp, Artificial Sequence
  primer
tacttcccatgacacaggtgg

SEQ ID NO: 106499 - DNA, 38 bp, Artificial Sequence
  primer
gtaaaacgacggccagttccttgtccaggtctagggtg

SEQ ID NO: 106500 - DNA, 20 bp, Artificial Sequence
  primer
atcgtcactcatccagcctc

SEQ ID NO: 106501 - DNA, 21 bp, Artificial Sequence
  primer
cagaggaggatgccataggac

SEQ ID NO: 106502 - DNA, 38 bp, Artificial Sequence
  primer
gtaaaacgacggccagtcattcctgcactctcaccaac

SEQ ID NO: 106503 - DNA, 38 bp, Artificial Sequence
  primer
gtaaaacgacggccagttttggacagggaaagatcagg

SEQ ID NO: 106504 - DNA, 37 bp, Artificial Sequence
  primer
gtaaaacgacggccagtgggagggaccagaaactgtc

SEQ ID NO: 106505 - DNA, 38 bp, Artificial Sequence
  primer
gtaaaacgacggccagtaatgaccgaaggcagagtttg

SEQ ID NO: 106506 - DNA, 37 bp, Artificial Sequence
  primer
gtaaaacgacggccagttatcaagctgacaggcgtgg

SEQ ID NO: 106507 - DNA, 21 bp, Artificial Sequence
  primer
ccattgaatgctaggtctgcc

SEQ ID NO: 106508 - DNA, 21 bp, Artificial Sequence
  primer
taactgttggcacagaaaccc

SEQ ID NO: 106509 - DNA, 38 bp, Artificial Sequence
  primer
gtaaaacgacggccagtctgtatcagggtcagtgtggc

SEQ ID NO: 106510 - DNA, 21 bp, Artificial Sequence
  primer
gacaggatgagcaggaatgtg

SEQ ID NO: 106511 - DNA, 20 bp, Artificial Sequence
  primer
tgtcctctgtccactcccac

SEQ ID NO: 106512 - DNA, 21 bp, Artificial Sequence
  primer
cttgaagactccctggaccac

SEQ ID NO: 106513 - DNA, 36 bp, Artificial Sequence
  primer
gtaaaacgacggccagtaggagacagtgggtgctgg

SEQ ID NO: 106514 - DNA, 21 bp, Artificial Sequence
  primer
agggacgctactggaaagatg

SEQ ID NO: 106515 - DNA, 21 bp, Artificial Sequence
  primer
gagggaggagagcttagggtg

SEQ ID NO: 106516 - DNA, 21 bp, Artificial Sequence
  primer
gaggaaccctgaactgattcg

SEQ ID NO: 106517 - DNA, 21 bp, Artificial Sequence
  primer
gtcccagtggctacctctcac

SEQ ID NO: 106518 - DNA, 21 bp, Artificial Sequence
  primer
tctttggccaccatctaatcg

SEQ ID NO: 106519 - DNA, 21 bp, Artificial Sequence
  primer
tcttctcctcccactttctgc

SEQ ID NO: 106520 - DNA, 21 bp, Artificial Sequence
  primer
tacatccctaccacccaaagc

SEQ ID NO: 106521 - DNA, 21 bp, Artificial Sequence
  primer
ctttagtgcaaaccagctccc

SEQ ID NO: 106522 - DNA, 20 bp, Artificial Sequence
  primer
ggccttctctccacttccac

SEQ ID NO: 106523 - DNA, 38 bp, Artificial Sequence
  primer
gtaaaacgacggccagtagctccacatagccctcaaac

SEQ ID NO: 106524 - DNA, 21 bp, Artificial Sequence
  primer
ctttgaagagctgaatgacgg

SEQ ID NO: 106525 - DNA, 38 bp, Artificial Sequence
  primer
gtaaaacgacggccagtaatgactgaggaaggtcaggc

SEQ ID NO: 106526 - DNA, 38 bp, Artificial Sequence
  primer
gtaaaacgacggccagtggagacatgctgttccctacc

SEQ ID NO: 106527 - DNA, 38 bp, Artificial Sequence
  primer
gtaaaacgacggccagtgaatgtaatgcctccactccc

SEQ ID NO: 106528 - DNA, 37 bp, Artificial Sequence
  primer
gtaaaacgacggccagtggtgctgcctgagatacgtc

SEQ ID NO: 106529 - DNA, 21 bp, Artificial Sequence
  primer
tacaaatgaggaaatgctggg

SEQ ID NO: 106530 - DNA, 39 bp, Artificial Sequence
  primer
gtaaaacgacggccagtcctatctacctcccagtccagg

SEQ ID NO: 106531 - DNA, 37 bp, Artificial Sequence
  primer
gtaaaacgacggccagttcccttccagaggatgttgg

SEQ ID NO: 106532 - DNA, 38 bp, Artificial Sequence
  primer
gtaaaacgacggccagtccaaagacacagtcgtcctcc

SEQ ID NO: 106533 - DNA, 36 bp, Artificial Sequence
  primer
gtaaaacgacggccagtatgggcttatggaccctcc

SEQ ID NO: 106534 - DNA, 38 bp, Artificial Sequence; identical to SEQ ID NO: 106532
  primer

SEQ ID NO: 106535 - DNA, 36 bp, Artificial Sequence
  primer
gtaaaacgacggccagtaggcctttaagaggcaggc

SEQ ID NO: 106536 - DNA, 21 bp, Artificial Sequence
  primer
gagtcacagcggagatagtgc

SEQ ID NO: 106537 - DNA, 38 bp, Artificial Sequence; identical to SEQ ID NO: 106532
  primer

SEQ ID NO: 106538 - DNA, 36 bp, Artificial Sequence; identical to SEQ ID NO: 106533
  primer

SEQ ID NO: 106539 - DNA, 21 bp, Artificial Sequence
  primer
gtttgcctgtggaagtctgtg

SEQ ID NO: 106540 - DNA, 22 bp, Artificial Sequence
  primer
gcccggctggtaatattcttat

SEQ ID NO: 106541 - DNA, 21 bp, Artificial Sequence
  primer
caagcagaggaagaaagcgag

SEQ ID NO: 106542 - DNA, 21 bp, Artificial Sequence
  primer
ctgtgtttccctctccattcc

SEQ ID NO: 106543 - DNA, 37 bp, Artificial Sequence
  primer
gtaaaacgacggccagtatactgaagggcctccaagg

SEQ ID NO: 106544 - DNA, 21 bp, Artificial Sequence
  primer
gtggatggaacaagaagaggg

SEQ ID NO: 106545 - DNA, 21 bp, Artificial Sequence
  primer
gacgtgcgttacagtctgtcc

SEQ ID NO: 106546 - DNA, 22 bp, Artificial Sequence
  primer
ggactagatttaacccaggcag

SEQ ID NO: 106547 - DNA, 21 bp, Artificial Sequence
  primer
ttgtcccatgcctattgtcag

SEQ ID NO: 106548 - DNA, 21 bp, Artificial Sequence
  primer
cagggctggaagtatggtagg

SEQ ID NO: 106549 - DNA, 38 bp, Artificial Sequence
  primer
gtaaaacgacggccagtgcataggcctggatggtaaag

SEQ ID NO: 106550 - DNA, 21 bp, Artificial Sequence
  primer
ttagaatgcatgttgggaagg

SEQ ID NO: 106551 - DNA, 21 bp, Artificial Sequence
  primer
ggaaggctggaagggacttag

SEQ ID NO: 106552 - DNA, 38 bp, Artificial Sequence
  primer
gtaaaacgacggccagttcagaaggtgtcccttcactg

SEQ ID NO: 106553 - DNA, 39 bp, Artificial Sequence
  primer
gtaaaacgacggccagttggaaccagaggttctcatagg

SEQ ID NO: 106554 - DNA, 21 bp, Artificial Sequence
  primer
agggaggaagaaaggaccaac

SEQ ID NO: 106555 - DNA, 21 bp, Artificial Sequence
  primer
ggcagaggcaaggatttacac

SEQ ID NO: 106556 - DNA, 21 bp, Artificial Sequence
  primer
ccggcctaagtacaggtcttg

SEQ ID NO: 106557 - DNA, 38 bp, Artificial Sequence
  primer
gtaaaacgacggccagtgaggaaggccaatcactcatc

SEQ ID NO: 106558 - DNA, 38 bp, Artificial Sequence
  primer
gtaaaacgacggccagttgccattatacagggcctagc

SEQ ID NO: 106559 - DNA, 21 bp, Artificial Sequence
  primer
acattccaacagcaggtccag

SEQ ID NO: 106560 - DNA, 21 bp, Artificial Sequence
  primer
agggtaccgtcgctctaactc

SEQ ID NO: 106561 - DNA, 20 bp, Artificial Sequence
  primer
gatctctgtggtgacagggc

SEQ ID NO: 106562 - DNA, 20 bp, Artificial Sequence
  primer
agaggtggagccctgagaac

SEQ ID NO: 106563 - DNA, 38 bp, Artificial Sequence
  primer
gtaaaacgacggccagtctatctgtccaccatcttgcc

SEQ ID NO: 106564 - DNA, 38 bp, Artificial Sequence
  primer
gtaaaacgacggccagttctctctctccatccctccag

SEQ ID NO: 106565 - DNA, 38 bp, Artificial Sequence
  primer
gtaaaacgacggccagttgttccctccctctctcattt

SEQ ID NO: 106566 - DNA, 38 bp, Artificial Sequence
  primer
gtaaaacgacggccagttattaggacaaggctggtggg

SEQ ID NO: 106567 - DNA, 38 bp, Artificial Sequence
  primer
gtaaaacgacggccagtgaagagaaggagaggccaagc

SEQ ID NO: 106568 - DNA, 37 bp, Artificial Sequence
  primer
gtaaaacgacggccagtgtcacaggatgctactcggg

SEQ ID NO: 106569 - DNA, 38 bp, Artificial Sequence
  primer
gtaaaacgacggccagttggccttagatggcgatactc

SEQ ID NO: 106570 - DNA, 21 bp, Artificial Sequence
  primer
ccttcagggtgtagagaaggg

SEQ ID NO: 106571 - DNA, 39 bp, Artificial Sequence
  primer
gtaaaacgacggccagtgatggcgatattcacattcaga

SEQ ID NO: 106572 - DNA, 38 bp, Artificial Sequence
  primer
gtaaaacgacggccagtctcagcctatgctcatctgcc

SEQ ID NO: 106573 - DNA, 38 bp, Artificial Sequence
  primer
gtaaaacgacggccagtgcagctctaagttctgcaggg

SEQ ID NO: 106574 - DNA, 38 bp, Artificial Sequence
  primer
gtaaaacgacggccagtggtgagttctcttgggtcagc

SEQ ID NO: 106575 - DNA, 21 bp, Artificial Sequence
  primer
ctccataccaccaccttccac

SEQ ID NO: 106576 - DNA, 38 bp, Artificial Sequence
  primer
gtaaaacgacggccagtagctgcatcctctctcctctg

SEQ ID NO: 106577 - DNA, 20 bp, Artificial Sequence
  primer
ttggctttgtaccagttggg

SEQ ID NO: 106578 - DNA, 20 bp, Artificial Sequence
  primer
cttctgctccctgtcccttc

SEQ ID NO: 106579 - DNA, 21 bp, Artificial Sequence
  primer
caaggtgtgaggaaacaaggg

SEQ ID NO: 106580 - DNA, 38 bp, Artificial Sequence
  primer
gtaaaacgacggccagtactggactatcaggcactggg

SEQ ID NO: 106581 - DNA, 21 bp, Artificial Sequence
  primer
gacgagagtggtcagaaaggg

SEQ ID NO: 106582 - DNA, 38 bp, Artificial Sequence
  primer
gtaaaacgacggccagtgacgagagtggtcagaaaggg

SEQ ID NO: 106583 - DNA, 38 bp, Artificial Sequence
  primer
gtaaaacgacggccagttggaggtgacatgatttgtcc

SEQ ID NO: 106584 - DNA, 38 bp, Artificial Sequence
  primer
gtaaaacgacggccagttctcgatgcacgaaattgttg

SEQ ID NO: 106585 - DNA, 21 bp, Artificial Sequence
  primer
gcccaaaggagtagatttccc

SEQ ID NO: 106586 - DNA, 20 bp, Artificial Sequence
  primer
gcttctaggccttgattggg

SEQ ID NO: 106587 - DNA, 38 bp, Artificial Sequence
  primer
gtaaaacgacggccagtacaggtgggtccaagagagac

SEQ ID NO: 106588 - DNA, 35 bp, Artificial Sequence
  primer
gtaaaacgacggccagtactccgtaccctgcggtc

SEQ ID NO: 106589 - DNA, 38 bp, Artificial Sequence
  primer
gtaaaacgacggccagtgaaccaactccggacacaata

SEQ ID NO: 106590 - DNA, 36 bp, Artificial Sequence
  primer
gtaaaacgacggccagtgacctgcgacatagcagcc

SEQ ID NO: 106591 - DNA, 41 bp, Artificial Sequence
  primer
gtaaaacgacggccagtgacattgtaagagtcagctcaaca

SEQ ID NO: 106592 - DNA, 21 bp, Artificial Sequence
  primer
caattcttgaagctcgttggg

SEQ ID NO: 106593 - DNA, 24 bp, Artificial Sequence
  primer
cccagctgtcgactatatgatttc

SEQ ID NO: 106594 - DNA, 21 bp, Artificial Sequence
  primer
accacgacattcctccgtaac

SEQ ID NO: 106595 - DNA, 27 bp, Artificial Sequence
  primer
tgtgagaagggactaatacagaacttt

SEQ ID NO: 106596 - DNA, 40 bp, Artificial Sequence
  primer
gtaaaacgacggccagtcaaattccaaggaaaggtttctg

SEQ ID NO: 106597 - DNA, 39 bp, Artificial Sequence
  primer
gtaaaacgacggccagtgggctgtttgcttcaacaatag

SEQ ID NO: 106598 - DNA, 21 bp, Artificial Sequence
  primer
agaatctcatctccacccacc

SEQ ID NO: 106599 - DNA, 21 bp, Artificial Sequence
  primer
aggaagttcccgtcatgattc

SEQ ID NO: 106600 - DNA, 37 bp, Artificial Sequence
  primer
gtaaaacgacggccagtctaaatgggcggtctgtgtc

SEQ ID NO: 106601 - DNA, 24 bp, Artificial Sequence
  primer
accttgaaatgcaacttcacatac

SEQ ID NO: 106602 - DNA, 37 bp, Artificial Sequence
  primer
gtaaaacgacggccagtttgttggtttgtgtgtgtgc

SEQ ID NO: 106603 - DNA, 21 bp, Artificial Sequence
  primer
gtaaagtgtgctcctatgcgg

SEQ ID NO: 106604 - DNA, 38 bp, Artificial Sequence
  primer
gtaaaacgacggccagtcatctgcaggctggaaataag

SEQ ID NO: 106605 - DNA, 21 bp, Artificial Sequence
  primer
caccacccagctagttagacg

SEQ ID NO: 106606 - DNA, 38 bp, Artificial Sequence
  primer
gtaaaacgacggccagttgcctttattccttaccacga

SEQ ID NO: 106607 - DNA, 38 bp, Artificial Sequence
  primer
gtaaaacgacggccagttacaaacacacacggatgcac

SEQ ID NO: 106608 - DNA, 37 bp, Artificial Sequence
  primer
gtaaaacgacggccagtgaccaccctaggcttcttgc

SEQ ID NO: 106609 - DNA, 41 bp, Artificial Sequence
  primer
gtaaaacgacggccagtcgaagtgacattacaccttctcaa

SEQ ID NO: 106610 - DNA, 24 bp, Artificial Sequence
  primer
tccgaatatacaaccagtcaacag

SEQ ID NO: 106611 - DNA, 38 bp, Artificial Sequence
  primer
gtaaaacgacggccagtaaggaagtcaatgcaacatgg

SEQ ID NO: 106612 - DNA, 38 bp, Artificial Sequence
  primer
gtaaaacgacggccagttaatggtttcaaggcaacagc

SEQ ID NO: 106613 - DNA, 39 bp, Artificial Sequence
  primer
gtaaaacgacggccagtcgctggtgaatataaatggagg

SEQ ID NO: 106614 - DNA, 25 bp, Artificial Sequence
  primer
ccagagaacatgaaagaaactcttg

SEQ ID NO: 106615 - DNA, 21 bp, Artificial Sequence
  primer
tttgcagcctggtgtagtctc

SEQ ID NO: 106616 - DNA, 22 bp, Artificial Sequence
  primer
ttatatggccatgaactgggac

SEQ ID NO: 106617 - DNA, 22 bp, Artificial Sequence
  primer
cgtgttgaaatgtgaaaccatt

SEQ ID NO: 106618 - DNA, 22 bp, Artificial Sequence
  primer
tggaaggcctgctacttaaatg

SEQ ID NO: 106619 - DNA, 23 bp, Artificial Sequence
  primer
tgatagttgattatcccaccctc

SEQ ID NO: 106620 - DNA, 38 bp, Artificial Sequence
  primer
gtaaaacgacggccagttttgtctgagactagccgtgg

SEQ ID NO: 106621 - DNA, 21 bp, Artificial Sequence
  primer
gccagatggatttacgtagcc

SEQ ID NO: 106622 - DNA, 22 bp, Artificial Sequence
  primer
cacacggctgaaagaacaattt

SEQ ID NO: 106623 - DNA, 38 bp, Artificial Sequence
  primer
gtaaaacgacggccagtctttcagcactagagcaacca

SEQ ID NO: 106624 - DNA, 22 bp, Artificial Sequence
  primer
cgcaactggcttatgtatttcg

SEQ ID NO: 106625 - DNA, 22 bp, Artificial Sequence
  primer
ggctttggctttaagagagctg

SEQ ID NO: 106626 - DNA, 21 bp, Artificial Sequence
  primer
tgcaggttaaacgcatcattc

SEQ ID NO: 106627 - DNA, 23 bp, Artificial Sequence
  primer
tctcaaagttactctgccaaagc

SEQ ID NO: 106628 - DNA, 38 bp, Artificial Sequence
  primer
gtaaaacgacggccagtcaagcttggaaccagttaggg

SEQ ID NO: 106629 - DNA, 22 bp, Artificial Sequence
  primer
ttaacagcatgcgacatattcc

SEQ ID NO: 106630 - DNA, 40 bp, Artificial Sequence
  primer
gtaaaacgacggccagtggatttcgttggtgaatttcttc

SEQ ID NO: 106631 - DNA, 36 bp, Artificial Sequence
  primer
gtaaaacgacggccagtaaacaaggcgtgggacaac

SEQ ID NO: 106632 - DNA, 24 bp, Artificial Sequence
  primer
tttctatttgatacatgacctccg

SEQ ID NO: 106633 - DNA, 38 bp, Artificial Sequence
  primer
gtaaaacgacggccagttgattgcaccactgtactccc

SEQ ID NO: 106634 - DNA, 22 bp, Artificial Sequence
  primer
ctgcttgatctcttgagaatgc

SEQ ID NO: 106635 - DNA, 29 bp, Artificial Sequence
  primer
tcctaatgtagtttagaggaatcattcag

SEQ ID NO: 106636 - DNA, 38 bp, Artificial Sequence
  primer
gtaaaacgacggccagtagtttgcatggccactagaag

SEQ ID NO: 106637 - DNA, 35 bp, Artificial Sequence
  primer
gtaaaacgacggccagtcggacttctcccgaaagc

SEQ ID NO: 106638 - DNA, 39 bp, Artificial Sequence
  primer
gtaaaacgacggccagtaagctcaccactgacataagcc

SEQ ID NO: 106639 - DNA, 20 bp, Artificial Sequence
  primer
aatcacactgggaggtgcag

SEQ ID NO: 106640 - DNA, 24 bp, Artificial Sequence
  primer
cacctctcctgttctctttctttg

SEQ ID NO: 106641 - DNA, 38 bp, Artificial Sequence
  primer
gtaaaacgacggccagtatggagacaggctcttgatgg

SEQ ID NO: 106642 - DNA, 38 bp, Artificial Sequence
  primer
gtaaaacgacggccagtcctacaattggtgatgggagg

SEQ ID NO: 106643 - DNA, 38 bp, Artificial Sequence
  primer
gtaaaacgacggccagttataagagcggcgtatttggc

SEQ ID NO: 106644 - DNA, 21 bp, Artificial Sequence
  primer
aatacctccatgcacccagtc

SEQ ID NO: 106645 - DNA, 21 bp, Artificial Sequence
  primer
gccatacgaataagcaactgg

SEQ ID NO: 106646 - DNA, 39 bp, Artificial Sequence
  primer
gtaaaacgacggccagttgctgttcaagaattcctagcc

SEQ ID NO: 106647 - DNA, 21 bp, Artificial Sequence
  primer
accaggaaggtcctcagattg

SEQ ID NO: 106648 - DNA, 20 bp, Artificial Sequence
  primer
acccaatttcggaatgaagc

SEQ ID NO: 106649 - DNA, 38 bp, Artificial Sequence
  primer
gtaaaacgacggccagtaccaaactttgaggacatccg

SEQ ID NO: 106650 - DNA, 20 bp, Artificial Sequence
  primer
gacactagcctgatgggcag

SEQ ID NO: 106651 - DNA, 38 bp, Artificial Sequence
  primer
gtaaaacgacggccagtaacttggtcgtggactaacgg

SEQ ID NO: 106652 - DNA, 40 bp, Artificial Sequence
  primer
gtaaaacgacggccagtggagaggctccaatgagttacag

SEQ ID NO: 106653 - DNA, 21 bp, Artificial Sequence
  primer
gatggccagttcattgcttac

SEQ ID NO: 106654 - DNA, 21 bp, Artificial Sequence
  primer
attgcattatttccggctttg

SEQ ID NO: 106655 - DNA, 21 bp, Artificial Sequence
  primer
atacatgtgcatgtgagcacg

SEQ ID NO: 106656 - DNA, 22 bp, Artificial Sequence
  primer
ggaagggagagtggtatatggc

SEQ ID NO: 106657 - DNA, 38 bp, Artificial Sequence
  primer
gtaaaacgacggccagtccacgtttggaaattggaatc

SEQ ID NO: 106658 - DNA, 37 bp, Artificial Sequence
  primer
gtaaaacgacggccagtccaaccggaaacctctaagc

SEQ ID NO: 106659 - DNA, 21 bp, Artificial Sequence
  primer
gaacacttccctgcatctgtg

SEQ ID NO: 106660 - DNA, 39 bp, Artificial Sequence
  primer
gtaaaacgacggccagtgactggatgtcactggaagctc

SEQ ID NO: 106661 - DNA, 37 bp, Artificial Sequence
  primer
gtaaaacgacggccagtggtccaggcactgaggagac

SEQ ID NO: 106662 - DNA, 21 bp, Artificial Sequence
  primer
cgtacaaagaaggcaaggatg

SEQ ID NO: 106663 - DNA, 21 bp, Artificial Sequence
  primer
attccagcatcatctggcttc

SEQ ID NO: 106664 - DNA, 38 bp, Artificial Sequence
  primer
gtaaaacgacggccagtccaggagagaatgtcaaagcc

SEQ ID NO: 106665 - DNA, 21 bp, Artificial Sequence
  primer
aataagtgcagggagtgaggg

SEQ ID NO: 106666 - DNA, 21 bp, Artificial Sequence
  primer
ccttaagctgaacgatggctg

SEQ ID NO: 106667 - DNA, 21 bp, Artificial Sequence
  primer
tatggtctagggaccaggcag

SEQ ID NO: 106668 - DNA, 38 bp, Artificial Sequence
  primer
gtaaaacgacggccagtttctgactgcaaatccagacc

SEQ ID NO: 106669 - DNA, 21 bp, Artificial Sequence
  primer
ctggattagctaggaaacggg

SEQ ID NO: 106670 - DNA, 19 bp, Artificial Sequence
  primer
ggagcaccttcgatcatcc

SEQ ID NO: 106671 - DNA, 21 bp, Artificial Sequence
  primer
tcgttctgggagaagaggaag

SEQ ID NO: 106672 - DNA, 38 bp, Artificial Sequence
  primer
gtaaaacgacggccagtacatttcagcgttggtactgg

SEQ ID NO: 106673 - DNA, 21 bp, Artificial Sequence
  primer
cacagcctagccaagaacacc

SEQ ID NO: 106674 - DNA, 37 bp, Artificial Sequence
  primer
gtaaaacgacggccagtctctcgaaagcccaaccttc

SEQ ID NO: 106675 - DNA, 38 bp, Artificial Sequence
  primer
gtaaaacgacggccagtcgaagcccagaggtcactatc

SEQ ID NO: 106676 - DNA, 23 bp, Artificial Sequence
  primer
ccagagactggtagcagaaggag

SEQ ID NO: 106677 - DNA, 21 bp, Artificial Sequence
  primer
gtgggctaagtcagcctcttg

SEQ ID NO: 106678 - DNA, 21 bp, Artificial Sequence
  primer
ttggtcctctctttctcccag

SEQ ID NO: 106679 - DNA, 22 bp, Artificial Sequence
  primer
tttgtatctcgtgagcaagcag

SEQ ID NO: 106680 - DNA, 38 bp, Artificial Sequence
  primer
gtaaaacgacggccagtggattcagtccaagttgatgg

SEQ ID NO: 106681 - DNA, 21 bp, Artificial Sequence
  primer
ttgatcacaaggttctccagg

SEQ ID NO: 106682 - DNA, 37 bp, Artificial Sequence
  primer
gtaaaacgacggccagtggatgaaggaaagtgagggc

SEQ ID NO: 106683 - DNA, 21 bp, Artificial Sequence
  primer
ctgtttcaattctcttggccc

SEQ ID NO: 106684 - DNA, 38 bp, Artificial Sequence
  primer
gtaaaacgacggccagtctctctctcggcttcttcacc

SEQ ID NO: 106685 - DNA, 20 bp, Artificial Sequence
  primer
cccagggctctcctcactac

SEQ ID NO: 106686 - DNA, 38 bp, Artificial Sequence
  primer
gtaaaacgacggccagttatacacatccacggcaaacc

SEQ ID NO: 106687 - DNA, 21 bp, Artificial Sequence
  primer
tttgagaaacgtcagcactcg

SEQ ID NO: 106688 - DNA, 21 bp, Artificial Sequence
  primer
gtgcttctagagcctccttcc

SEQ ID NO: 106689 - DNA, 38 bp, Artificial Sequence
  primer
gtaaaacgacggccagtcaaacaccctgagaaagggac

SEQ ID NO: 106690 - DNA, 21 bp, Artificial Sequence
  primer
ctgtcttcacacagcccacag

SEQ ID NO: 106691 - DNA, 21 bp, Artificial Sequence
  primer
gtggttgtcacctgtgagctg

SEQ ID NO: 106692 - DNA, 21 bp, Artificial Sequence
  primer
ttgcaggacctttcgaatctc

SEQ ID NO: 106693 - DNA, 21 bp, Artificial Sequence
  primer
tcacctaggtttgtgggaagg

SEQ ID NO: 106694 - DNA, 37 bp, Artificial Sequence
  primer
gtaaaacgacggccagtctctgctggtgtaaggctgg

SEQ ID NO: 106695 - DNA, 21 bp, Artificial Sequence
  primer
aatgggcagacctcctgtaac

SEQ ID NO: 106696 - DNA, 21 bp, Artificial Sequence
  primer
ggcccaagtttgtgctaagag

SEQ ID NO: 106697 - DNA, 19 bp, Artificial Sequence
  primer
gaagcttccctgactgggc

SEQ ID NO: 106698 - DNA, 38 bp, Artificial Sequence
  primer
gtaaaacgacggccagtggaggctcaaggaagacattg

SEQ ID NO: 106699 - DNA, 38 bp, Artificial Sequence
  primer
gtaaaacgacggccagtgagcaggtaggtggaacatgg

SEQ ID NO: 106700 - DNA, 21 bp, Artificial Sequence
  primer
tatttgaaacccaggaggctg

SEQ ID NO: 106701 - DNA, 21 bp, Artificial Sequence
  primer
agacactgaggctccaagagg

SEQ ID NO: 106702 - DNA, 38 bp, Artificial Sequence
  primer
gtaaaacgacggccagtgcacagggcctactgtttctc

SEQ ID NO: 106703 - DNA, 23 bp, Artificial Sequence
  primer
caagtgacctttcatgttatggg

SEQ ID NO: 106704 - DNA, 21 bp, Artificial Sequence
  primer
aaactgcagcacagactcctc

SEQ ID NO: 106705 - DNA, 22 bp, Artificial Sequence
  primer
tcaggtgaggcagatttaggag

SEQ ID NO: 106706 - DNA, 38 bp, Artificial Sequence
  primer
gtaaaacgacggccagtgaggaaacccacatttggaag

SEQ ID NO: 106707 - DNA, 39 bp, Artificial Sequence
  primer
gtaaaacgacggccagttcactccttgcaggaatctttc

SEQ ID NO: 106708 - DNA, 21 bp, Artificial Sequence
  primer
cactgcaatccctggtgatac

SEQ ID NO: 106709 - DNA, 39 bp, Artificial Sequence
  primer
gtaaaacgacggccagtgatggccaatagttggtgtttg

SEQ ID NO: 106710 - DNA, 26 bp, Artificial Sequence
  primer
aaacattagatcaacaatgctttcag

SEQ ID NO: 106711 - DNA, 21 bp, Artificial Sequence
  primer
caatcacactcacaccttggg

SEQ ID NO: 106712 - DNA, 38 bp, Artificial Sequence
  primer
gtaaaacgacggccagttgggaataagagcaggagcag

SEQ ID NO: 106713 - DNA, 21 bp, Artificial Sequence
  primer
tccatggatagccttctcctc

SEQ ID NO: 106714 - DNA, 38 bp, Artificial Sequence
  primer
gtaaaacgacggccagtagagagatgctcagggcctac

SEQ ID NO: 106715 - DNA, 21 bp, Artificial Sequence
  primer
tacctattctgggccttccag

SEQ ID NO: 106716 - DNA, 39 bp, Artificial Sequence
  primer
gtaaaacgacggccagtggaaagtaatcatctcaggccc

SEQ ID NO: 106717 - DNA, 21 bp, Artificial Sequence
  primer
actgttcaaagaggcagaggg

SEQ ID NO: 106718 - DNA, 21 bp, Artificial Sequence
  primer
attcaaacatgacccagatgc

SEQ ID NO: 106719 - DNA, 21 bp, Artificial Sequence
  primer
gccctctttcagctcaagttc

SEQ ID NO: 106720 - DNA, 38 bp, Artificial Sequence
  primer
gtaaaacgacggccagtagcaactctcagcaacacgag

SEQ ID NO: 106721 - DNA, 38 bp, Artificial Sequence
  primer
gtaaaacgacggccagtatgccattaggctcatccttg

SEQ ID NO: 106722 - DNA, 20 bp, Artificial Sequence
  primer
ccaagttgccagattgatcc

SEQ ID NO: 106723 - DNA, 21 bp, Artificial Sequence
  primer
cccagtcctctacctgaccac

SEQ ID NO: 106724 - DNA, 21 bp, Artificial Sequence
  primer
agcgacacagagaggcttagg

SEQ ID NO: 106725 - DNA, 38 bp, Artificial Sequence
  primer
gtaaaacgacggccagttgtctatgtggtgtgtgcgac

SEQ ID NO: 106726 - DNA, 21 bp, Artificial Sequence
  primer
agtaagctgccagcctctctc

SEQ ID NO: 106727 - DNA, 21 bp, Artificial Sequence
  primer
agtaagctgccagcctctctc

SEQ ID NO: 106728 - DNA, 21 bp, Artificial Sequence
  primer
ccaagctaatttgttcatggg

SEQ ID NO: 106729 - DNA, 43 bp, Artificial Sequence
  primer
gtaaaacgacggccagtgatgttgtctcaaatgttgattcttc

SEQ ID NO: 106730 - DNA, 38 bp, Artificial Sequence
  primer
gtaaaacgacggccagtgaagaaacaggcaccaaacac

SEQ ID NO: 106731 - DNA, 25 bp, Artificial Sequence
  primer
tgacaacctcttcacataactttcc

SEQ ID NO: 106732 - DNA, 23 bp, Artificial Sequence
  primer
cacattattgtctcagcaacagc

SEQ ID NO: 106733 - DNA, 38 bp, Artificial Sequence
  primer
gtaaaacgacggccagttggctctctttcagctcattc

SEQ ID NO: 106734 - DNA, 21 bp, Artificial Sequence
  primer
tgggagtttgccacgttaatc

SEQ ID NO: 106735 - DNA, 38 bp, Artificial Sequence
  primer
gtaaaacgacggccagttgcagtttgatgccactaaga

SEQ ID NO: 106736 - DNA, 25 bp, Artificial Sequence
  primer
gattattaattggaaattccttggg

SEQ ID NO: 106737 - DNA, 24 bp, Artificial Sequence
  primer
gcatgttccgtattatttctttgc

SEQ ID NO: 106738 - DNA, 39 bp, Artificial Sequence
  primer
gtaaaacgacggccagtttctgctggtagtagtgggagc

SEQ ID NO: 106739 - DNA, 38 bp, Artificial Sequence
  primer
gtaaaacgacggccagttgggagaaagatgaggtatgc

SEQ ID NO: 106740 - DNA, 21 bp, Artificial Sequence
  primer
ttacacggttgcagctctttg

SEQ ID NO: 106741 - DNA, 41 bp, Artificial Sequence
  primer
gtaaaacgacggccagtaggataatgtgtttcttgttgtgg

SEQ ID NO: 106742 - DNA, 39 bp, Artificial Sequence
  primer
gtaaaacgacggccagtcagatggaagcattcaaagcac

SEQ ID NO: 106743 - DNA, 44 bp, Artificial Sequence
  primer
gtaaaacgacggccagtcacacaccttataaagcattaacattc

SEQ ID NO: 106744 - DNA, 25 bp, Artificial Sequence
  primer
tggtttgataacataaatttgccag

SEQ ID NO: 106745 - DNA, 38 bp, Artificial Sequence
  primer
gtaaaacgacggccagttctctcatagcaacagcctgg

SEQ ID NO: 106746 - DNA, 22 bp, Artificial Sequence
  primer
ttcagtgtattccaagctttcc

SEQ ID NO: 106747 - DNA, 43 bp, Artificial Sequence
  primer
gtaaaacgacggccagtttcaacagattataaagaacgaaggg

SEQ ID NO: 106748 - DNA, 26 bp, Artificial Sequence
  primer
tgtgtgaatggtagaatcaacttacg

SEQ ID NO: 106749 - DNA, 21 bp, Artificial Sequence
  primer
acttaccgggctgttgttagg

SEQ ID NO: 106750 - DNA, 29 bp, Artificial Sequence
  primer
tgttagttctatgaggacagaaagaattt

SEQ ID NO: 106751 - DNA, 35 bp, Artificial Sequence
  primer
gtaaaacgacggccagtgccttccggtctggatgt

SEQ ID NO: 106752 - DNA, 23 bp, Artificial Sequence
  primer
cctttgctgcagaaatataggaa

SEQ ID NO: 106753 - DNA, 21 bp, Artificial Sequence
  primer
tttgtacattctgcggaggtt

SEQ ID NO: 106754 - DNA, 26 bp, Artificial Sequence
  primer
aagctagaacaactattagcactggg

SEQ ID NO: 106755 - DNA, 39 bp, Artificial Sequence
  primer
gtaaaacgacggccagtgggccataccaaattattctcc

SEQ ID NO: 106756 - DNA, 23 bp, Artificial Sequence
  primer
gagacacctgggaatataagcac

SEQ ID NO: 106757 - DNA, 38 bp, Artificial Sequence
  primer
gtaaaacgacggccagtatgaaggcacttgcaaggtta

SEQ ID NO: 106758 - DNA, 40 bp, Artificial Sequence
  primer
gtaaaacgacggccagtcaatcccagagaatagttggttg

SEQ ID NO: 106759 - DNA, 21 bp, Artificial Sequence
  primer
tgatctagtgatggtggaggg

SEQ ID NO: 106760 - DNA, 22 bp, Artificial Sequence
  primer
ttgcaacaaatctccactgatt

SEQ ID NO: 106761 - DNA, 25 bp, Artificial Sequence
  primer
tctattcatttcaaccatgtcagtc

SEQ ID NO: 106762 - DNA, 24 bp, Artificial Sequence
  primer
actattcctgaaccctaactcagc

SEQ ID NO: 106763 - DNA, 41 bp, Artificial Sequence
  primer
gtaaaacgacggccagttttgttgagagggtagatttcaca

SEQ ID NO: 106764 - DNA, 22 bp, Artificial Sequence
  primer
tttgacctcagacacaaaccag

SEQ ID NO: 106765 - DNA, 24 bp, Artificial Sequence
  primer
catccactgatactgaagttgagg

SEQ ID NO: 106766 - DNA, 44 bp, Artificial Sequence
  primer
gtaaaacgacggccagtttatccaagtactccaagtgaaatgta

SEQ ID NO: 106767 - DNA, 24 bp, Artificial Sequence
  primer
tcttcctaattgaagctcaccttg

SEQ ID NO: 106768 - DNA, 40 bp, Artificial Sequence
  primer
gtaaaacgacggccagttgctattggaagaggaagacaag

SEQ ID NO: 106769 - DNA, 24 bp, Artificial Sequence
  primer
caagacacatactgtcaccctcag

SEQ ID NO: 106770 - DNA, 21 bp, Artificial Sequence
  primer
tttgcaaggaaatgtgtttga

SEQ ID NO: 106771 - DNA, 41 bp, Artificial Sequence
  primer
gtaaaacgacggccagtgagggtctcaagacaggctattac

SEQ ID NO: 106772 - DNA, 46 bp, Artificial Sequence
  primer
gtaaaacgacggccagttgataaacagtggactatttctaaatgaa

SEQ ID NO: 106773 - DNA, 45 bp, Artificial Sequence
  primer
gtaaaacgacggccagtagcagctgtttatactcaaagtttacat

SEQ ID NO: 106774 - DNA, 21 bp, Artificial Sequence
  primer
caatggaggagctgtgatttg

SEQ ID NO: 106775 - DNA, 40 bp, Artificial Sequence
  primer
gtaaaacgacggccagttgcttccgaatatttccattctc

SEQ ID NO: 106776 - DNA, 23 bp, Artificial Sequence
  primer
tcacatttcagtttagggattgg

SEQ ID NO: 106777 - DNA, 26 bp, Artificial Sequence
  primer
tgtttatgaaaggaactgattcaaac

SEQ ID NO: 106778 - DNA, 22 bp, Artificial Sequence
  primer
ggaatgctatttgattattccg

SEQ ID NO: 106779 - DNA, 25 bp, Artificial Sequence
  primer
caaattggattgtggaaatttactt

SEQ ID NO: 106780 - DNA, 40 bp, Artificial Sequence
  primer
gtaaaacgacggccagtggaaagcattgttaatgagatga

SEQ ID NO: 106781 - DNA, 24 bp, Artificial Sequence
  primer
aattacatttggacattgaatttg

SEQ ID NO: 106782 - DNA, 26 bp, Artificial Sequence
  primer
ccagtaatgtgtaagcagtgtttcag

SEQ ID NO: 106783 - DNA, 26 bp, Artificial Sequence
  primer
tggttacagtataatgggaatacgac

SEQ ID NO: 106784 - DNA, 41 bp, Artificial Sequence
  primer
gtaaaacgacggccagttcctttaatctgaaaggcagtaca

SEQ ID NO: 106785 - DNA, 24 bp, Artificial Sequence
  primer
aaataaatgcaacctggaactaaa

SEQ ID NO: 106786 - DNA, 25 bp, Artificial Sequence
  primer
aattaggcattgaaggaagcttaac

SEQ ID NO: 106787 - DNA, 38 bp, Artificial Sequence
  primer
gtaaaacgacggccagttttccagtgccttctaattgc

SEQ ID NO: 106788 - DNA, 46 bp, Artificial Sequence
  primer
gtaaaacgacggccagttgtttataaatgcagatagaacatgactt

SEQ ID NO: 106789 - DNA, 39 bp, Artificial Sequence
  primer
gtaaaacgacggccagttggccatgggtttatgatacag

SEQ ID NO: 106790 - DNA, 38 bp, Artificial Sequence
  primer
gtaaaacgacggccagtagccaacaaatttcccttgtt

SEQ ID NO: 106791 - DNA, 43 bp, Artificial Sequence
  primer
gtaaaacgacggccagtttagcagacggaactatgaacaatac

SEQ ID NO: 106792 - DNA, 40 bp, Artificial Sequence
  primer
gtaaaacgacggccagtccttggttctgagtgaatatgaa

SEQ ID NO: 106793 - DNA, 41 bp, Artificial Sequence
  primer
gtaaaacgacggccagtcagaatccagtattcctaggcttg

SEQ ID NO: 106794 - DNA, 21 bp, Artificial Sequence
  primer
taaaggcaagccagtttgtca

SEQ ID NO: 106795 - DNA, 41 bp, Artificial Sequence
  primer
gtaaaacgacggccagtttagcacacagacatttcaacaac

SEQ ID NO: 106796 - DNA, 26 bp, Artificial Sequence
  primer
catgaagaattatggtccagtttatg

SEQ ID NO: 106797 - DNA, 20 bp, Artificial Sequence
  primer
gccatcatgggagttgacac

SEQ ID NO: 106798 - DNA, 38 bp, Artificial Sequence
  primer
gtaaaacgacggccagttgtcaagacttcagaggccaa

SEQ ID NO: 106799 - DNA, 23 bp, Artificial Sequence
  primer
gcttgaactaaagaaatgatgcg

SEQ ID NO: 106800 - DNA, 21 bp, Artificial Sequence
  primer
acattcaacatgcatgacagc

SEQ ID NO: 106801 - DNA, 40 bp, Artificial Sequence
  primer
gtaaaacgacggccagttgtttccctactccttctttgtg

SEQ ID NO: 106802 - DNA, 24 bp, Artificial Sequence
  primer
tttggtaccttgatttcatcagtc

SEQ ID NO: 106803 - DNA, 21 bp, Artificial Sequence
  primer
gccttgtttcatcacagttgc

SEQ ID NO: 106804 - DNA, 44 bp, Artificial Sequence
  primer
gtaaaacgacggccagtgcaatacagagatcagtgacattatcc

SEQ ID NO: 106805 - DNA, 39 bp, Artificial Sequence
  primer
gtaaaacgacggccagtaatggcttaaattccgtcttcc

SEQ ID NO: 106806 - DNA, 21 bp, Artificial Sequence
  primer
gccagataagattgtttgccc

SEQ ID NO: 106807 - DNA, 21 bp, Artificial Sequence
  primer
caaatatgccggcaatcatac

SEQ ID NO: 106808 - DNA, 28 bp, Artificial Sequence
  primer
caattagtaaggttcatactctgaggaa

SEQ ID NO: 106809 - DNA, 22 bp, Artificial Sequence
  primer
tgagaaaccaaaggtccaagag

SEQ ID NO: 106810 - DNA, 21 bp, Artificial Sequence
  primer
agtcctttgcagtaggcattg

SEQ ID NO: 106811 - DNA, 25 bp, Artificial Sequence
  primer
aaagaacaatttccttcaatatggg

SEQ ID NO: 106812 - DNA, 21 bp, Artificial Sequence
  primer
gccttgtttcatcacagttgc

SEQ ID NO: 106813 - DNA, 21 bp, Artificial Sequence
  primer
ttaatgccacctttccagatg

SEQ ID NO: 106814 - DNA, 38 bp, Artificial Sequence
  primer
gtaaaacgacggccagtggaaactgttgagacagtggg

SEQ ID NO: 106815 - DNA, 41 bp, Artificial Sequence
  primer
gtaaaacgacggccagtcaagtagcaagccaatttacaaag

SEQ ID NO: 106816 - DNA, 23 bp, Artificial Sequence
  primer
gctggtcctcatgtttaaccttc

SEQ ID NO: 106817 - DNA, 38 bp, Artificial Sequence
  primer
gtaaaacgacggccagtaagtggttggtgggtatatgg

SEQ ID NO: 106818 - DNA, 38 bp, Artificial Sequence
  primer
gtaaaacgacggccagtgggaagtgcaagagtctgagg

SEQ ID NO: 106819 - DNA, 20 bp, Artificial Sequence
  primer
caagtggctgagtcacaggg

SEQ ID NO: 106820 - DNA, 38 bp, Artificial Sequence
  primer
gtaaaacgacggccagttgaaagcaagccagtcaaatc

SEQ ID NO: 106821 - DNA, 45 bp, Artificial Sequence
  primer
gtaaaacgacggccagttcctgtacatgattaagtgtgatttctt

SEQ ID NO: 106822 - DNA, 40 bp, Artificial Sequence
  primer
gtaaaacgacggccagtttgattcatatcacctgttgctg

SEQ ID NO: 106823 - DNA, 38 bp, Artificial Sequence
  primer
gtaaaacgacggccagtatgccgtaggtggagtaactg

SEQ ID NO: 106824 - DNA, 39 bp, Artificial Sequence
  primer
gtaaaacgacggccagttctggtgtatcaatgctatggg

SEQ ID NO: 106825 - DNA, 21 bp, Artificial Sequence
  primer
ccaacgtaagaggtgcttgag

SEQ ID NO: 106826 - DNA, 21 bp, Artificial Sequence
  primer
tgggacgtgtttaacaaggtg

SEQ ID NO: 106827 - DNA, 21 bp, Artificial Sequence
  primer
tcagctggtctcattacctgc

SEQ ID NO: 106828 - DNA, 44 bp, Artificial Sequence
  primer
gtaaaacgacggccagtgcctatgctaaggttaaatagtgatgc

SEQ ID NO: 106829 - DNA, 38 bp, Artificial Sequence
  primer
gtaaaacgacggccagtcctcggttgggtaagttgaag

SEQ ID NO: 106830 - DNA, 38 bp, Artificial Sequence
  primer
gtaaaacgacggccagtagcatccttcaaatcctcagc

SEQ ID NO: 106831 - DNA, 21 bp, Artificial Sequence
  primer
ccagtgggtaccagcttactg

SEQ ID NO: 106832 - DNA, 38 bp, Artificial Sequence
  primer
gtaaaacgacggccagttcatgtgacctactgccttgg

SEQ ID NO: 106833 - DNA, 41 bp, Artificial Sequence
  primer
gtaaaacgacggccagttgccaaattagtcccaaataaatc

SEQ ID NO: 106834 - DNA, 24 bp, Artificial Sequence
  primer
aaccacctccttgatctaacactg

SEQ ID NO: 106835 - DNA, 38 bp, Artificial Sequence
  primer
gtaaaacgacggccagtaaaccggacaccatgtttcac

SEQ ID NO: 106836 - DNA, 21 bp, Artificial Sequence
  primer
taaagaggtcttcgaggctgg

SEQ ID NO: 106837 - DNA, 21 bp, Artificial Sequence
  primer
tcatagcccttagtccttgcc

SEQ ID NO: 106838 - DNA, 37 bp, Artificial Sequence
  primer
gtaaaacgacggccagtgcagcccacgacagtagttc

SEQ ID NO: 106839 - DNA, 38 bp, Artificial Sequence
  primer
gtaaaacgacggccagttggttgttcacagccactagc

SEQ ID NO: 106840 - DNA, 36 bp, Artificial Sequence
  primer
gtaaaacgacggccagtgctagcctagtggccgttg

SEQ ID NO: 106841 - DNA, 21 bp, Artificial Sequence
  primer
ttgtcagggtgtggagaacac

SEQ ID NO: 106842 - DNA, 20 bp, Artificial Sequence
  primer
atggcaagaacagcacaagc

SEQ ID NO: 106843 - DNA, 20 bp, Artificial Sequence
  primer
gtctgatgacacgcttgcag

SEQ ID NO: 106844 - DNA, 38 bp, Artificial Sequence
  primer
gtaaaacgacggccagtcctttggaaggtgagcaactc

SEQ ID NO: 106845 - DNA, 21 bp, Artificial Sequence
  primer
acttgcccttcacaaccagag

SEQ ID NO: 106846 - DNA, 21 bp, Artificial Sequence
  primer
agtgtccaccaccaagtaccc

SEQ ID NO: 106847 - DNA, 38 bp, Artificial Sequence
  primer
gtaaaacgacggccagtaaaggaaagaagaagccctgg

SEQ ID NO: 106848 - DNA, 20 bp, Artificial Sequence
  primer
cagctcttggagtctgtccg

SEQ ID NO: 106849 - DNA, 22 bp, Artificial Sequence
  primer
cagagcagaagaagcctcactc

SEQ ID NO: 106850 - DNA, 20 bp, Artificial Sequence
  primer
aaataccctccagtgcccag

SEQ ID NO: 106851 - DNA, 38 bp, Artificial Sequence
  primer
gtaaaacgacggccagtaatttgcgggaacagaagttg

SEQ ID NO: 106852 - DNA, 19 bp, Artificial Sequence
  primer
atcctctggcatcctctgg

SEQ ID NO: 106853 - DNA, 35 bp, Artificial Sequence
  primer
gtaaaacgacggccagtgggcctccatcagggtag

SEQ ID NO: 106854 - DNA, 38 bp, Artificial Sequence
  primer
gtaaaacgacggccagttttgtatggcctcacctttcc

SEQ ID NO: 106855 - DNA, 21 bp, Artificial Sequence
  primer
gtcaaccacactgtccagctc

SEQ ID NO: 106856 - DNA, 21 bp, Artificial Sequence
  primer
gtattgcctggagggagagtg

SEQ ID NO: 106857 - DNA, 21 bp, Artificial Sequence
  primer
tcgatggaaagggaagaacag

SEQ ID NO: 106858 - DNA, 38 bp, Artificial Sequence
  primer
gtaaaacgacggccagtcctccacaacacattggtctc

SEQ ID NO: 106859 - DNA, 26 bp, Artificial Sequence
  primer
aaactataaacggcttgtcttgaaac

SEQ ID NO: 106860 - DNA, 26 bp, Artificial Sequence
  primer
ttcacagagttactagttcttccagc

SEQ ID NO: 106861 - DNA, 21 bp, Artificial Sequence
  primer
atttacctatccggcaagcag

SEQ ID NO: 106862 - DNA, 21 bp, Artificial Sequence
  primer
ttcttgatgtgttgctacggc

SEQ ID NO: 106863 - DNA, 22 bp, Artificial Sequence
  primer
acaagttgtaatgcacaatggg

SEQ ID NO: 106864 - DNA, 37 bp, Artificial Sequence
  primer
gtaaaacgacggccagtatgaagccagaggctccttc

SEQ ID NO: 106865 - DNA, 38 bp, Artificial Sequence
  primer
gtaaaacgacggccagtggaaagagatgaaaggccctg

SEQ ID NO: 106866 - DNA, 20 bp, Artificial Sequence
  primer
tggcaagtaaaggcatgagg

SEQ ID NO: 106867 - DNA, 22 bp, Artificial Sequence
  primer
cactaaagcggagaagctgaag

SEQ ID NO: 106868 - DNA, 38 bp, Artificial Sequence
  primer
gtaaaacgacggccagttctttggattctgctttcacc

SEQ ID NO: 106869 - DNA, 20 bp, Artificial Sequence
  primer
acggactgatgattcaacgc

SEQ ID NO: 106870 - DNA, 21 bp, Artificial Sequence
  primer
gctgagctgcttgtagaaccg

SEQ ID NO: 106871 - DNA, 37 bp, Artificial Sequence
  primer
gtaaaacgacggccagtcgcacggaccgaagtagtag

SEQ ID NO: 106872 - DNA, 21 bp, Artificial Sequence
  primer
ttcacgtcccggtagattagg

SEQ ID NO: 106873 - DNA, 20 bp, Artificial Sequence
  primer
gtctgtggtcagccttgctc

SEQ ID NO: 106874 - DNA, 38 bp, Artificial Sequence
  primer
gtaaaacgacggccagtcttctggtaccgctccttgag

SEQ ID NO: 106875 - DNA, 21 bp, Artificial Sequence
  primer
tagtcgaacacgaagccactg

SEQ ID NO: 106876 - DNA, 35 bp, Artificial Sequence
  primer
gtaaaacgacggccagtccggttcccatctccctc

SEQ ID NO: 106877 - DNA, 38 bp, Artificial Sequence
  primer
gtaaaacgacggccagtagccttacttggtttcatcgg

SEQ ID NO: 106878 - DNA, 21 bp, Artificial Sequence
  primer
gaaacagcagcatctgaggag

SEQ ID NO: 106879 - DNA, 19 bp, Artificial Sequence
  primer
agtctgcgttctggcttcc

SEQ ID NO: 106880 - DNA, 27 bp, Artificial Sequence
  primer
accacaaccattaaacaactaaacaat

SEQ ID NO: 106881 - DNA, 41 bp, Artificial Sequence
  primer
gtaaaacgacggccagtaggagcttagcaacaaagattagc

SEQ ID NO: 106882 - DNA, 38 bp, Artificial Sequence
  primer
gtaaaacgacggccagttagccttgcaaagtgatttcc

SEQ ID NO: 106883 - DNA, 23 bp, Artificial Sequence
  primer
tttgtattacgtcaaacgctctg

SEQ ID NO: 106884 - DNA, 27 bp, Artificial Sequence
  primer
tgtaaagatagctgtcactcatttact

SEQ ID NO: 106885 - DNA, 20 bp, Artificial Sequence
  primer
cttgagcccaggagtttgag

SEQ ID NO: 106886 - DNA, 20 bp, Artificial Sequence
  primer
ggcatcaaatgctgacaacc

SEQ ID NO: 106887 - DNA, 21 bp, Artificial Sequence
  primer
cactacctgcagaaatgtccc

SEQ ID NO: 106888 - DNA, 44 bp, Artificial Sequence
  primer
gtaaaacgacggccagtaatagggtatccaaatacttccattct

SEQ ID NO: 106889 - DNA, 25 bp, Artificial Sequence
  primer
cctatttcaagcataataccgtttg

SEQ ID NO: 106890 - DNA, 37 bp, Artificial Sequence
  primer
gtaaaacgacggccagtttgcatgcacctattccctg

SEQ ID NO: 106891 - DNA, 21 bp, Artificial Sequence
  primer
attcactgatgggcaaagcac

SEQ ID NO: 106892 - DNA, 21 bp, Artificial Sequence
  primer
acacaaattgggctttgatcc

SEQ ID NO: 106893 - DNA, 42 bp, Artificial Sequence
  primer
gtaaaacgacggccagtcgatctgtcaaataagcagaacttg

SEQ ID NO: 106894 - DNA, 39 bp, Artificial Sequence
  primer
gtaaaacgacggccagtggacttaatgatgagggttggg

SEQ ID NO: 106895 - DNA, 21 bp, Artificial Sequence
  primer
aaacaaatgcgaagcaagctc

SEQ ID NO: 106896 - DNA, 20 bp, Artificial Sequence
  primer
tttgatctcctggcctcaag

SEQ ID NO: 106897 - DNA, 21 bp, Artificial Sequence
  primer
ctgccgaataggtactagggc

SEQ ID NO: 106898 - DNA, 21 bp, Artificial Sequence
  primer
aaaggacagctgtgaatgtgc

SEQ ID NO: 106899 - DNA, 40 bp, Artificial Sequence
  primer
gtaaaacgacggccagttgaactgaaagttacaggcagtg

SEQ ID NO: 106900 - DNA, 21 bp, Artificial Sequence
  primer
ctggaccactgacatcctgac

SEQ ID NO: 106901 - DNA, 21 bp, Artificial Sequence
  primer
caggagctgggattacgactc

SEQ ID NO: 106902 - DNA, 21 bp, Artificial Sequence
  primer
tgtcaagcatgctgaaacctg

SEQ ID NO: 106903 - DNA, 21 bp, Artificial Sequence
  primer
agacacggtgcttctgaagtg

SEQ ID NO: 106904 - DNA, 20 bp, Artificial Sequence
  primer
tttgatctcctggcctcaag

SEQ ID NO: 106905 - DNA, 39 bp, Artificial Sequence
  primer
gtaaaacgacggccagtgctgcagtgaactatgatctgc

SEQ ID NO: 106906 - DNA, 24 bp, Artificial Sequence
  primer
ccactgtatcattacgtgaggttc

SEQ ID NO: 106907 - DNA, 21 bp, Artificial Sequence
  primer
cactcatgccttaaggaaccc

SEQ ID NO: 106908 - DNA, 21 bp, Artificial Sequence
  primer
tggaccaacaagagctatggg

SEQ ID NO: 106909 - DNA, 21 bp, Artificial Sequence
  primer
ccaccacgggtctacagaaac

SEQ ID NO: 106910 - DNA, 37 bp, Artificial Sequence
  primer
gtaaaacgacggccagtagggtgaaataatggctggg

SEQ ID NO: 106911 - DNA, 21 bp, Artificial Sequence
  primer
acttctgcggacctggtaaac

SEQ ID NO: 106912 - DNA, 20 bp, Artificial Sequence
  primer
gctctccaagtttggccatt

SEQ ID NO: 106913 - DNA, 23 bp, Artificial Sequence
  primer
ggaataatccaatccaaataccc

SEQ ID NO: 106914 - DNA, 38 bp, Artificial Sequence
  primer
gtaaaacgacggccagttcaaggtttgtgtttggttgg

SEQ ID NO: 106915 - DNA, 21 bp, Artificial Sequence
  primer
cactttagcacaggttcgtcg

SEQ ID NO: 106916 - DNA, 21 bp, Artificial Sequence
  primer
ttggaataggtctgaattgcg

SEQ ID NO: 106917 - DNA, 21 bp, Artificial Sequence
  primer
aacaatcccttcaggatgacc

SEQ ID NO: 106918 - DNA, 21 bp, Artificial Sequence
  primer
ctcaggctccaatgtgttgag

SEQ ID NO: 106919 - DNA, 21 bp, Artificial Sequence
  primer
tgattctgggagaagcagacc

SEQ ID NO: 106920 - DNA, 21 bp, Artificial Sequence
  primer
catacagggttcctgaaaggg

SEQ ID NO: 106921 - DNA, 20 bp, Artificial Sequence
  primer
attgccatttcatcctccag

SEQ ID NO: 106922 - DNA, 35 bp, Artificial Sequence
  primer
gtaaaacgacggccagtccggatgggatatctggg

SEQ ID NO: 106923 - DNA, 21 bp, Artificial Sequence
  primer
caaacaagcacgaagacttgc

SEQ ID NO: 106924 - DNA, 38 bp, Artificial Sequence
  primer
gtaaaacgacggccagtcggctagttgaacatcaatgc

SEQ ID NO: 106925 - DNA, 21 bp, Artificial Sequence
  primer
tagtcatccatatcccagggc

SEQ ID NO: 106926 - DNA, 40 bp, Artificial Sequence
  primer
gtaaaacgacggccagttgtttatcttccacgacaccatc

SEQ ID NO: 106927 - DNA, 21 bp, Artificial Sequence
  primer
tggtcaaagatcaaggtgctc

SEQ ID NO: 106928 - DNA, 21 bp, Artificial Sequence
  primer
atttgccaagaaactcttccg

SEQ ID NO: 106929 - DNA, 44 bp, Artificial Sequence
  primer
gtaaaacgacggccagttgttctcatctctggtattagtgtttc

SEQ ID NO: 106930 - DNA, 41 bp, Artificial Sequence
  primer
gtaaaacgacggccagtaagacttggtcatttccacagaag

SEQ ID NO: 106931 - DNA, 25 bp, Artificial Sequence
  primer
ttgctgtaaagtcttcctccatatc

SEQ ID NO: 106932 - DNA, 38 bp, Artificial Sequence
  primer
gtaaaacgacggccagtacagttgtgagtaaggcaggg

SEQ ID NO: 106933 - DNA, 42 bp, Artificial Sequence
  primer
gtaaaacgacggccagttgtagttggctgaaatctaattgtg

SEQ ID NO: 106934 - DNA, 21 bp, Artificial Sequence
  primer
ggttgcataaacttggccttc

SEQ ID NO: 106935 - DNA, 24 bp, Artificial Sequence
  primer
aagaggaatggtatgggaagagtc

SEQ ID NO: 106936 - DNA, 21 bp, Artificial Sequence
  primer
tgtatatgctgatccatcgcc

SEQ ID NO: 106937 - DNA, 21 bp, Artificial Sequence
  primer
tatgagttctgtggctttggg

SEQ ID NO: 106938 - DNA, 38 bp, Artificial Sequence
  primer
gtaaaacgacggccagtaggcctctttgtcttccacag

SEQ ID NO: 106939 - DNA, 21 bp, Artificial Sequence
  primer
ctagcttctgcagcttctggg

SEQ ID NO: 106940 - DNA, 37 bp, Artificial Sequence
  primer
gtaaaacgacggccagtaacatcaggctcaccacctg

SEQ ID NO: 106941 - DNA, 21 bp, Artificial Sequence
  primer
ctgagattcttggtcaatggc

SEQ ID NO: 106942 - DNA, 21 bp, Artificial Sequence
  primer
ttggaatcgaagaactccctg

SEQ ID NO: 106943 - DNA, 38 bp, Artificial Sequence
  primer
gtaaaacgacggccagtctggataaatggtggttgcag

SEQ ID NO: 106944 - DNA, 38 bp, Artificial Sequence
  primer
gtaaaacgacggccagtccctttcagactgtgttggtg

SEQ ID NO: 106945 - DNA, 38 bp, Artificial Sequence
  primer
gtaaaacgacggccagtaacagtggtggtttctgggtc

SEQ ID NO: 106946 - DNA, 38 bp, Artificial Sequence
  primer
gtaaaacgacggccagtgtccctaaatgctgcatctcc

SEQ ID NO: 106947 - DNA, 38 bp, Artificial Sequence
  primer
gtaaaacgacggccagtcacttctcccaatccttcgtc

SEQ ID NO: 106948 - DNA, 38 bp, Artificial Sequence
  primer
gtaaaacgacggccagttggctggctctatagtttggg

SEQ ID NO: 106949 - DNA, 44 bp, Artificial Sequence
  primer
gtaaaacgacggccagtttcagtttcagtaaatgtctgtgaatc

SEQ ID NO: 106950 - DNA, 21 bp, Artificial Sequence
  primer
cttctcctgatcccagtccag

SEQ ID NO: 106951 - DNA, 38 bp, Artificial Sequence
  primer
gtaaaacgacggccagtttgtgctggttactgacccac

SEQ ID NO: 106952 - DNA, 23 bp, Artificial Sequence
  primer
tcttgttcagttatggtttgtgg

SEQ ID NO: 106953 - DNA, 43 bp, Artificial Sequence
  primer
gtaaaacgacggccagttccagaaggttcataatacaagtcag

SEQ ID NO: 106954 - DNA, 38 bp, Artificial Sequence
  primer
gtaaaacgacggccagttccttgtcctctttgtccagg

SEQ ID NO: 106955 - DNA, 21 bp, Artificial Sequence
  primer
gtttctgtgctaggagcaggg

SEQ ID NO: 106956 - DNA, 38 bp, Artificial Sequence
  primer
gtaaaacgacggccagttggatccttccatcacatcag

SEQ ID NO: 106957 - DNA, 21 bp, Artificial Sequence
  primer
tgtgggagaagcttccatttc

SEQ ID NO: 106958 - DNA, 38 bp, Artificial Sequence
  primer
gtaaaacgacggccagtctggagaagaagaaagcgtgg

SEQ ID NO: 106959 - DNA, 21 bp, Artificial Sequence
  primer
tagcaccaagggactgtttcc

SEQ ID NO: 106960 - DNA, 24 bp, Artificial Sequence
  primer
tgattcgacaacataaattctccc

SEQ ID NO: 106961 - DNA, 21 bp, Artificial Sequence
  primer
ccactgcaggaaagattatgc

SEQ ID NO: 106962 - DNA, 21 bp, Artificial Sequence
  primer
gcagacaaaccaatgcctacc

SEQ ID NO: 106963 - DNA, 38 bp, Artificial Sequence
  primer
gtaaaacgacggccagtcttgcctccagtctaatgcac

SEQ ID NO: 106964 - DNA, 21 bp, Artificial Sequence
  primer
ttggactggcagttgttcttc

SEQ ID NO: 106965 - DNA, 38 bp, Artificial Sequence
  primer
gtaaaacgacggccagtctaaactgccgataccacagc

SEQ ID NO: 106966 - DNA, 38 bp, Artificial Sequence
  primer
gtaaaacgacggccagttctcgaggtgataggaaaggc

SEQ ID NO: 106967 - DNA, 38 bp, Artificial Sequence
  primer
gtaaaacgacggccagttattctctagcccatgccagg

SEQ ID NO: 106968 - DNA, 37 bp, Artificial Sequence
  primer
gtaaaacgacggccagtaggtgacattcagtgggtgg

SEQ ID NO: 106969 - DNA, 21 bp, Artificial Sequence
  primer
cgggactgggtgataggatac

SEQ ID NO: 106970 - DNA, 21 bp, Artificial Sequence
  primer
gaatcatgtcttggttgcagg

SEQ ID NO: 106971 - DNA, 38 bp, Artificial Sequence
  primer
gtaaaacgacggccagtgagcttccatgtgtctctccc

SEQ ID NO: 106972 - DNA, 21 bp, Artificial Sequence
  primer
gtgtgtgaacttgctgcagtg

SEQ ID NO: 106973 - DNA, 37 bp, Artificial Sequence
  primer
gtaaaacgacggccagtctgggatttggagcttcctc

SEQ ID NO: 106974 - DNA, 38 bp, Artificial Sequence
  primer
gtaaaacgacggccagttttctctgaagtctgccctgg

SEQ ID NO: 106975 - DNA, 38 bp, Artificial Sequence
  primer
gtaaaacgacggccagttcacagtgggtccttcatctg

SEQ ID NO: 106976 - DNA, 38 bp, Artificial Sequence
  primer
gtaaaacgacggccagtagcttgaggagcccagtgtag

SEQ ID NO: 106977 - DNA, 38 bp, Artificial Sequence
  primer
gtaaaacgacggccagtctttgtactcaccctcctccg

SEQ ID NO: 106978 - DNA, 38 bp, Artificial Sequence
  primer
gtaaaacgacggccagttaagctcctacctccagcgtc

SEQ ID NO: 106979 - DNA, 21 bp, Artificial Sequence
  primer
aatggagcatctgaaaccagc

SEQ ID NO: 106980 - DNA, 37 bp, Artificial Sequence
  primer
gtaaaacgacggccagtagggacctggagtatgtggg

SEQ ID NO: 106981 - DNA, 38 bp, Artificial Sequence
  primer
gtaaaacgacggccagtgcattaagaagcagtcagggc

SEQ ID NO: 106982 - DNA, 38 bp, Artificial Sequence
  primer
gtaaaacgacggccagtacccaattgcgataactttgc

SEQ ID NO: 106983 - DNA, 21 bp, Artificial Sequence
  primer
gtgcatgcctatagtcccacc

SEQ ID NO: 106984 - DNA, 38 bp, Artificial Sequence
  primer
gtaaaacgacggccagtaagccagatcaatgtgtggag

SEQ ID NO: 106985 - DNA, 21 bp, Artificial Sequence
  primer
tctctctgggttctgtctccc

SEQ ID NO: 106986 - DNA, 37 bp, Artificial Sequence
  primer
gtaaaacgacggccagtagctagtggtgggagaagcg

SEQ ID NO: 106987 - DNA, 38 bp, Artificial Sequence
  primer
gtaaaacgacggccagtccatcccacagtggagaactt

SEQ ID NO: 106988 - DNA, 21 bp, Artificial Sequence
  primer
aaactcttcagcacagccctc

SEQ ID NO: 106989 - DNA, 19 bp, Artificial Sequence
  primer
attggtggcctctggtgtc

SEQ ID NO: 106990 - DNA, 36 bp, Artificial Sequence
  primer
gtaaaacgacggccagtaacagcacctgggatttgc

SEQ ID NO: 106991 - DNA, 38 bp, Artificial Sequence
  primer
gtaaaacgacggccagtgatgggcaggaggtatgtttg

SEQ ID NO: 106992 - DNA, 20 bp, Artificial Sequence
  primer
atgtgggaagatgatgtggg

SEQ ID NO: 106993 - DNA, 19 bp, Artificial Sequence
  primer
cagaggaggtgccaaggac

SEQ ID NO: 106994 - DNA, 37 bp, Artificial Sequence
  primer
gtaaaacgacggccagttgctgggtgttctgagtgtg

SEQ ID NO: 106995 - DNA, 38 bp, Artificial Sequence
  primer
gtaaaacgacggccagtttctgtggtctcggagtcatc

SEQ ID NO: 106996 - DNA, 37 bp, Artificial Sequence
  primer
gtaaaacgacggccagtgcacgaacagtactcgcctc

SEQ ID NO: 106997 - DNA, 38 bp, Artificial Sequence
  primer
gtaaaacgacggccagtcagctggtcccttctgatctc

SEQ ID NO: 106998 - DNA, 38 bp, Artificial Sequence
  primer
gtaaaacgacggccagtacacatgtaacctggagccac

SEQ ID NO: 106999 - DNA, 20 bp, Artificial Sequence
  primer
cgacaccatcaccaggtagc

SEQ ID NO: 107000 - DNA, 21 bp, Artificial Sequence
  primer
acagccataccattctccagg

SEQ ID NO: 107001 - DNA, 21 bp, Artificial Sequence
  primer
tgcttctgaaatgtgactccc

SEQ ID NO: 107002 - DNA, 21 bp, Artificial Sequence
  primer
aaactgaggatcagagctggg

SEQ ID NO: 107003 - DNA, 18 bp, Artificial Sequence
  primer
gaagcggaagcctccatc

SEQ ID NO: 107004 - DNA, 38 bp, Artificial Sequence
  primer
gtaaaacgacggccagttgagggtctgactgctgagtg

SEQ ID NO: 107005 - DNA, 37 bp, Artificial Sequence
  primer
gtaaaacgacggccagtacactagcgcctggacaatg

SEQ ID NO: 107006 - DNA, 36 bp, Artificial Sequence
  primer
gtaaaacgacggccagtcctgtgacttcccaggtcc

SEQ ID NO: 107007 - DNA, 37 bp, Artificial Sequence
  primer
gtaaaacgacggccagtgcaaaggcctctgaggtttg

SEQ ID NO: 107008 - DNA, 21 bp, Artificial Sequence
  primer
tcagacatgctcagctggaag

SEQ ID NO: 107009 - DNA, 20 bp, Artificial Sequence
  primer
gtaggatgtccacagccagg

SEQ ID NO: 107010 - DNA, 21 bp, Artificial Sequence
  primer
aagttggtgaaggcaaagacc

SEQ ID NO: 107011 - DNA, 37 bp, Artificial Sequence
  primer
gtaaaacgacggccagtcctcaaggtcctgctgagtg

SEQ ID NO: 107012 - DNA, 20 bp, Artificial Sequence
  primer
ggcagcattgtaaggctcag

SEQ ID NO: 107013 - DNA, 37 bp, Artificial Sequence
  primer
gtaaaacgacggccagtacatgttggcctcaaggaag

SEQ ID NO: 107014 - DNA, 21 bp, Artificial Sequence
  primer
gatactcagacagcaccaggc

SEQ ID NO: 107015 - DNA, 19 bp, Artificial Sequence
  primer
ctggagcgtagctggaagg

SEQ ID NO: 107016 - DNA, 38 bp, Artificial Sequence
  primer
gtaaaacgacggccagtcagggtggttctctgaggttc

SEQ ID NO: 107017 - DNA, 39 bp, Artificial Sequence
  primer
gtaaaacgacggccagttccacctcctactgcatctttg

SEQ ID NO: 107018 - DNA, 20 bp, Artificial Sequence
  primer
ctacgctgccctctgttgag

SEQ ID NO: 107019 - DNA, 21 bp, Artificial Sequence
  primer
aagtccctggatcagttggag

SEQ ID NO: 107020 - DNA, 21 bp, Artificial Sequence
  primer
tagacatcagacatgggccag

SEQ ID NO: 107021 - DNA, 39 bp, Artificial Sequence
  primer
gtaaaacgacggccagtcaacccaatgtatgcaattctg

SEQ ID NO: 107022 - DNA, 21 bp, Artificial Sequence
  primer
atcctgcctctcccagacaag

SEQ ID NO: 107023 - DNA, 42 bp, Artificial Sequence
  primer
gtaaaacgacggccagttctccttaagccaatatagaaatgg

SEQ ID NO: 107024 - DNA, 22 bp, Artificial Sequence
  primer
cctctacactaagctgcaaccc

SEQ ID NO: 107025 - DNA, 26 bp, Artificial Sequence
  primer
tttcacagcagagtaacacacttatg

SEQ ID NO: 107026 - DNA, 27 bp, Artificial Sequence
  primer
ccatttgttaacagagtattcattgtc

SEQ ID NO: 107027 - DNA, 20 bp, Artificial Sequence
  primer
gtggatcatttgaggccaag

SEQ ID NO: 107028 - DNA, 21 bp, Artificial Sequence
  primer
ccatctcaacatgcaatggac

SEQ ID NO: 107029 - DNA, 21 bp, Artificial Sequence
  primer
atcatggagccactctgtcac

SEQ ID NO: 107030 - DNA, 21 bp, Artificial Sequence
  primer
agcaaggaccacatggctaat

SEQ ID NO: 107031 - DNA, 38 bp, Artificial Sequence
  primer
gtaaaacgacggccagtacacacctgtgctccagctat

SEQ ID NO: 107032 - DNA, 21 bp, Artificial Sequence
  primer
tccaacacacaccagtcacag

SEQ ID NO: 107033 - DNA, 37 bp, Artificial Sequence
  primer
gtaaaacgacggccagtattgagctcctcggacaacc

SEQ ID NO: 107034 - DNA, 25 bp, Artificial Sequence
  primer
tgtatattaaactgtgcaggccttt

SEQ ID NO: 107035 - DNA, 20 bp, Artificial Sequence
  primer
gcaagtgcttgctgttctgc

SEQ ID NO: 107036 - DNA, 21 bp, Artificial Sequence
  primer
ttggaacccatgacctacacc

SEQ ID NO: 107037 - DNA, 19 bp, Artificial Sequence
  primer
gggagggagaaactcccaa

SEQ ID NO: 107038 - DNA, 21 bp, Artificial Sequence
  primer
acccactcagcactaaggtcc

SEQ ID NO: 107039 - DNA, 37 bp, Artificial Sequence
  primer
gtaaaacgacggccagtacagggtttcgcctcgttag

SEQ ID NO: 107040 - DNA, 44 bp, Artificial Sequence
  primer
gtaaaacgacggccagtaagctaaacaaacataagctcttgaac

SEQ ID NO: 107041 - DNA, 21 bp, Artificial Sequence
  primer
gcgtatgtctgtagtcccagc

SEQ ID NO: 107042 - DNA, 38 bp, Artificial Sequence
  primer
gtaaaacgacggccagtcctagttagcaagaaaggccc

SEQ ID NO: 107043 - DNA, 21 bp, Artificial Sequence
  primer
aaagcccatgctttcaatcag

SEQ ID NO: 107044 - DNA, 39 bp, Artificial Sequence
  primer
gtaaaacgacggccagtgcatatgcttctgcctatttgg

SEQ ID NO: 107045 - DNA, 38 bp, Artificial Sequence
  primer
gtaaaacgacggccagtttctgtgttgcactgctcaag

SEQ ID NO: 107046 - DNA, 26 bp, Artificial Sequence
  primer
tgtattagattcacctggtaatgagg

SEQ ID NO: 107047 - DNA, 38 bp, Artificial Sequence
  primer
gtaaaacgacggccagtctaaagggcagaatcaccacc

SEQ ID NO: 107048 - DNA, 24 bp, Artificial Sequence
  primer
gcatgtacagcaagttccataatc

SEQ ID NO: 107049 - DNA, 37 bp, Artificial Sequence
  primer
gtaaaacgacggccagtaaccaatgcaacgccataaa

SEQ ID NO: 107050 - DNA, 40 bp, Artificial Sequence
  primer
gtaaaacgacggccagtggtttaaatttacagttcctggg

SEQ ID NO: 107051 - DNA, 21 bp, Artificial Sequence
  primer
ctctctgtccctttctgtggg

SEQ ID NO: 107052 - DNA, 27 bp, Artificial Sequence
  primer
gaaggaaggctgttaatttactgtatc

SEQ ID NO: 107053 - DNA, 21 bp, Artificial Sequence
  primer
cacctacggaaagcacatcac

SEQ ID NO: 107054 - DNA, 42 bp, Artificial Sequence
  primer
gtaaaacgacggccagtaaacatcatattagaacgacaaccc

SEQ ID NO: 107055 - DNA, 35 bp, Artificial Sequence
  primer
gtaaaacgacggccagtccacctgccaccacattt

SEQ ID NO: 107056 - DNA, 38 bp, Artificial Sequence
  primer
gtaaaacgacggccagtctgaagaataacgtcatccgc

SEQ ID NO: 107057 - DNA, 26 bp, Artificial Sequence
  primer
caatcgttatttcttaaaccaagatg

SEQ ID NO: 107058 - DNA, 38 bp, Artificial Sequence
  primer
gtaaaacgacggccagtgttgccagagaacggaggtag

SEQ ID NO: 107059 - DNA, 40 bp, Artificial Sequence
  primer
gtaaaacgacggccagtccacactctgagctctaagggac

SEQ ID NO: 107060 - DNA, 40 bp, Artificial Sequence
  primer
gtaaaacgacggccagtcatacatgcgttgctatagaggc

SEQ ID NO: 107061 - DNA, 21 bp, Artificial Sequence
  primer
acaccctagcctgggtagaca

SEQ ID NO: 107062 - DNA, 44 bp, Artificial Sequence
  primer
gtaaaacgacggccagttctaaatgtactccaacactgttctcc

SEQ ID NO: 107063 - DNA, 39 bp, Artificial Sequence
  primer
gtaaaacgacggccagtgttcagtacattgtgcccagac

SEQ ID NO: 107064 - DNA, 38 bp, Artificial Sequence
  primer
gtaaaacgacggccagtgaagcagcaggcaaattactg

SEQ ID NO: 107065 - DNA, 38 bp, Artificial Sequence
  primer
gtaaaacgacggccagttggagaatgggtacacagcac

SEQ ID NO: 107066 - DNA, 43 bp, Artificial Sequence
  primer
gtaaaacgacggccagtaagtaagatgaattagtcctgttccc

SEQ ID NO: 107067 - DNA, 44 bp, Artificial Sequence
  primer
gtaaaacgacggccagtccagactggttaactgaagacctagag

SEQ ID NO: 107068 - DNA, 39 bp, Artificial Sequence
  primer
gtaaaacgacggccagttgcctgggaatgaaatcaatag

SEQ ID NO: 107069 - DNA, 22 bp, Artificial Sequence
  primer
gactcactggaacagcctagtg

SEQ ID NO: 107070 - DNA, 21 bp, Artificial Sequence
  primer
gattccagcatttggcattag

SEQ ID NO: 107071 - DNA, 21 bp, Artificial Sequence
  primer
gctacccaaggtcatccagtc

SEQ ID NO: 107072 - DNA, 39 bp, Artificial Sequence
  primer
gtaaaacgacggccagttccctcagacgttagtgaaagc

SEQ ID NO: 107073 - DNA, 21 bp, Artificial Sequence
  primer
caatccagttcattaccaccc

SEQ ID NO: 107074 - DNA, 38 bp, Artificial Sequence
  primer
gtaaaacgacggccagtcttcagccaaatgtcaagctg

SEQ ID NO: 107075 - DNA, 21 bp, Artificial Sequence
  primer
ctgagccttccattgcttacc

SEQ ID NO: 107076 - DNA, 21 bp, Artificial Sequence
  primer
acccacagggacaaagagaag

SEQ ID NO: 107077 - DNA, 21 bp, Artificial Sequence
  primer
ttggactgggagttaggaagc

SEQ ID NO: 107078 - DNA, 39 bp, Artificial Sequence
  primer
gtaaaacgacggccagtcattagtgatatgtggcagggc

SEQ ID NO: 107079 - DNA, 21 bp, Artificial Sequence
  primer
gctgctaggcttggcatttac

SEQ ID NO: 107080 - DNA, 21 bp, Artificial Sequence
  primer
gagactgccaggttcctgttc

SEQ ID NO: 107081 - DNA, 38 bp, Artificial Sequence
  primer
gtaaaacgacggccagtaggaatgtggaagggttaggg

SEQ ID NO: 107082 - DNA, 21 bp, Artificial Sequence
  primer
cgctttgctcaagacatgaag

SEQ ID NO: 107083 - DNA, 21 bp, Artificial Sequence
  primer
agcctatccaagtacagggcg

SEQ ID NO: 107084 - DNA, 21 bp, Artificial Sequence
  primer
cacgtttctttcacaggttgg

SEQ ID NO: 107085 - DNA, 39 bp, Artificial Sequence
  primer
gtaaaacgacggccagtcactcccttctccacatattcg

SEQ ID NO: 107086 - DNA, 21 bp, Artificial Sequence
  primer
tccagcctgggagactctatc

SEQ ID NO: 107087 - DNA, 19 bp, Artificial Sequence
  primer
cagtggaagcaggagcgtc

SEQ ID NO: 107088 - DNA, 21 bp, Artificial Sequence
  primer
tttataccatggcccataccc

SEQ ID NO: 107089 - DNA, 21 bp, Artificial Sequence
  primer
tttcggctttgtgtccttctc

SEQ ID NO: 107090 - DNA, 21 bp, Artificial Sequence
  primer
tgcttgcattcacctggtatc

SEQ ID NO: 107091 - DNA, 38 bp, Artificial Sequence
  primer
gtaaaacgacggccagtcatgtccaatgcctagtgctg

SEQ ID NO: 107092 - DNA, 21 bp, Artificial Sequence
  primer
agaacagggcacagaaaccac

SEQ ID NO: 107093 - DNA, 24 bp, Artificial Sequence
  primer
gacaaacagggaagagaaacaaac

SEQ ID NO: 107094 - DNA, 38 bp, Artificial Sequence
  primer
gtaaaacgacggccagttcagcttcattcctcctccag

SEQ ID NO: 107095 - DNA, 21 bp, Artificial Sequence
  primer
ccctgtgaaatcaatcactgc

SEQ ID NO: 107096 - DNA, 22 bp, Artificial Sequence
  primer
ccactggcatacagtgtttgtg

SEQ ID NO: 107097 - DNA, 22 bp, Artificial Sequence
  primer
gctatgggaacgaaatgaactg

SEQ ID NO: 107098 - DNA, 21 bp, Artificial Sequence
  primer
gaaagtggctgaggatgtgtg

SEQ ID NO: 107099 - DNA, 21 bp, Artificial Sequence
  primer
ccaggcatgaacgtaatttcc

SEQ ID NO: 107100 - DNA, 38 bp, Artificial Sequence
  primer
gtaaaacgacggccagttattgcctctcccattccaag

SEQ ID NO: 107101 - DNA, 21 bp, Artificial Sequence
  primer
cgaccgtagtaggagcagagg

SEQ ID NO: 107102 - DNA, 21 bp, Artificial Sequence
  primer
gggaggataggagtcgtccac

SEQ ID NO: 107103 - DNA, 38 bp, Artificial Sequence
  primer
gtaaaacgacggccagtagaagacgaggaacgggctac

SEQ ID NO: 107104 - DNA, 21 bp, Artificial Sequence
  primer
aatgaatagaatcgctgccct

SEQ ID NO: 107105 - DNA, 38 bp, Artificial Sequence
  primer
gtaaaacgacggccagtataggcatgacgtctcactgg

SEQ ID NO: 107106 - DNA, 21 bp, Artificial Sequence
  primer
ctctcccttcattgggatcag

SEQ ID NO: 107107 - DNA, 39 bp, Artificial Sequence
  primer
gtaaaacgacggccagtgttacctttgggtcatactggc

SEQ ID NO: 107108 - DNA, 38 bp, Artificial Sequence
  primer
gtaaaacgacggccagtaagccagagttcagccagttg

SEQ ID NO: 107109 - DNA, 21 bp, Artificial Sequence
  primer
tgcttgaggtcaacaaacacc

SEQ ID NO: 107110 - DNA, 37 bp, Artificial Sequence
  primer
gtaaaacgacggccagttcagtgttgatttgctggga

SEQ ID NO: 107111 - DNA, 38 bp, Artificial Sequence
  primer
gtaaaacgacggccagtccaaacatgtgtagggcagag

SEQ ID NO: 107112 - DNA, 38 bp, Artificial Sequence
  primer
gtaaaacgacggccagtctgctgagcaacaaaggactc

SEQ ID NO: 107113 - DNA, 21 bp, Artificial Sequence
  primer
tgaatttcccttgagtgggac

SEQ ID NO: 107114 - DNA, 21 bp, Artificial Sequence
  primer
ctgctaccatgaaggcatagg

SEQ ID NO: 107115 - DNA, 22 bp, Artificial Sequence
  primer
tcccaactcattctaaagccac

SEQ ID NO: 107116 - DNA, 21 bp, Artificial Sequence
  primer
tatcagtgttgatgtgctgcg

SEQ ID NO: 107117 - DNA, 38 bp, Artificial Sequence; identical to SEQ ID NO: 107111
  primer

SEQ ID NO: 107118 - DNA, 38 bp, Artificial Sequence
  primer
gtaaaacgacggccagtgtgtgtaccatgtaccagggc

SEQ ID NO: 107119 - DNA, 18 bp, Artificial Sequence
  primer
gaacagggtccgggtgag

SEQ ID NO: 107120 - DNA, 20 bp, Artificial Sequence
  primer
acactcaggcacatgcacac

SEQ ID NO: 107121 - DNA, 20 bp, Artificial Sequence
  primer
cctgctgccttctctgtctg

SEQ ID NO: 107122 - DNA, 22 bp, Artificial Sequence
  primer
cagtgttgatttgcttggaatg

SEQ ID NO: 107123 - DNA, 38 bp, Artificial Sequence
  primer
gtaaaacgacggccagtgggtaggacagaggctgacac

SEQ ID NO: 107124 - DNA, 38 bp, Artificial Sequence
  primer
gtaaaacgacggccagtctgtctgtctcttggcacagg

SEQ ID NO: 107125 - DNA, 21 bp, Artificial Sequence
  primer
aatgttgatttgctgggagtg

SEQ ID NO: 107126 - DNA, 21 bp, Artificial Sequence
  primer
atgtgcaggagtacagatgcg

SEQ ID NO: 107127 - DNA, 21 bp, Artificial Sequence
  primer
tctgtgtctgtctcctggtgc

SEQ ID NO: 107128 - DNA, 20 bp, Artificial Sequence
  primer
aaatatcccgattgcgcttt

SEQ ID NO: 107129 - DNA, 38 bp, Artificial Sequence
  primer
gtaaaacgacggccagtccaaaccagttcaggatggac

SEQ ID NO: 107130 - DNA, 21 bp, Artificial Sequence
  primer
agcgaagcacttggaagaaac

SEQ ID NO: 107131 - DNA, 21 bp, Artificial Sequence
  primer
caaacccttcatccctgtagc

SEQ ID NO: 107132 - DNA, 21 bp, Artificial Sequence
  primer
ctaggtgtcgcgttgtagcag

SEQ ID NO: 107133 - DNA, 21 bp, Artificial Sequence
  primer
ctgcgttagagacgtggtgac

SEQ ID NO: 107134 - DNA, 20 bp, Artificial Sequence
  primer
tgagagggtctgtgaggctg

SEQ ID NO: 107135 - DNA, 20 bp, Artificial Sequence
  primer
tgcccactctttcagtctgg

SEQ ID NO: 107136 - DNA, 38 bp, Artificial Sequence
  primer
gtaaaacgacggccagtacctcaaagagaaggtctgcg

SEQ ID NO: 107137 - DNA, 38 bp, Artificial Sequence
  primer
gtaaaacgacggccagtccatcaagctgaacaaaggtg

SEQ ID NO: 107138 - DNA, 21 bp, Artificial Sequence
  primer
gctgatggtgaaccaagtctc

SEQ ID NO: 107139 - DNA, 20 bp, Artificial Sequence
  primer
ctgggcttaatgcctcactg

SEQ ID NO: 107140 - DNA, 25 bp, Artificial Sequence
  primer
tgaacaagactcttcaataagaccc

SEQ ID NO: 107141 - DNA, 38 bp, Artificial Sequence
  primer
gtaaaacgacggccagtctgcaggctcactcctctaag

SEQ ID NO: 107142 - DNA, 38 bp, Artificial Sequence
  primer
gtaaaacgacggccagtctgctcagccactgaagagtc

SEQ ID NO: 107143 - DNA, 21 bp, Artificial Sequence
  primer
atgttcaaccacagcctttcc

SEQ ID NO: 107144 - DNA, 38 bp, Artificial Sequence
  primer
gtaaaacgacggccagtgtccaccacttggaaggaatc

SEQ ID NO: 107145 - DNA, 38 bp, Artificial Sequence
  primer
gtaaaacgacggccagttagccagttgcattaggcttg

SEQ ID NO: 107146 - DNA, 20 bp, Artificial Sequence
  primer
cgggctatcaattcccactc

SEQ ID NO: 107147 - DNA, 38 bp, Artificial Sequence
  primer
gtaaaacgacggccagtccagcacctaagaccacacag

SEQ ID NO: 107148 - DNA, 38 bp, Artificial Sequence
  primer
gtaaaacgacggccagtcaagtgcacgctctggtagac

SEQ ID NO: 107149 - DNA, 23 bp, Artificial Sequence
  primer
tgaagtacccggctcatactagg

SEQ ID NO: 107150 - DNA, 38 bp, Artificial Sequence
  primer
gtaaaacgacggccagtctgaatccaagtgcacaatcc

SEQ ID NO: 107151 - DNA, 18 bp, Artificial Sequence
  primer
ggcatgcatcctggtctg

SEQ ID NO: 107152 - DNA, 38 bp, Artificial Sequence
  primer
gtaaaacgacggccagtaaacttcagcaccgtcatgtg

SEQ ID NO: 107153 - DNA, 38 bp, Artificial Sequence
  primer
gtaaaacgacggccagtagggtaacatctgccttgctc

SEQ ID NO: 107154 - DNA, 38 bp, Artificial Sequence
  primer
gtaaaacgacggccagtaaggatggtgcacggacttac

SEQ ID NO: 107155 - DNA, 38 bp, Artificial Sequence
  primer
gtaaaacgacggccagtgacgccctacaggataagcag

SEQ ID NO: 107156 - DNA, 21 bp, Artificial Sequence
  primer
ggcttgagtcactatgccctg

SEQ ID NO: 107157 - DNA, 38 bp, Artificial Sequence
  primer
gtaaaacgacggccagtgtaataaacaagctgcgtggc

SEQ ID NO: 107158 - DNA, 38 bp, Artificial Sequence
  primer
gtaaaacgacggccagtttgaaggtgcaagaaatggtg

SEQ ID NO: 107159 - DNA, 38 bp, Artificial Sequence
  primer
gtaaaacgacggccagtagcgttgggatatttgtctgg

SEQ ID NO: 107160 - DNA, 20 bp, Artificial Sequence
  primer
gctctgcaacctggaaattg

SEQ ID NO: 107161 - DNA, 38 bp, Artificial Sequence
  primer
gtaaaacgacggccagttatttggctgcactgcaacag

SEQ ID NO: 107162 - DNA, 36 bp, Artificial Sequence
  primer
gtaaaacgacggccagtatgggtggttagtggctgc

SEQ ID NO: 107163 - DNA, 38 bp, Artificial Sequence
  primer
gtaaaacgacggccagtgtgcttacccttggacagtgg

SEQ ID NO: 107164 - DNA, 21 bp, Artificial Sequence
  primer
tgcttgcaaacctactgttcc

SEQ ID NO: 107165 - DNA, 18 bp, Artificial Sequence
  primer
gcccaagtcagaaggcag

SEQ ID NO: 107166 - DNA, 39 bp, Artificial Sequence
  primer
gtaaaacgacggccagtcaggatcgtcacatggtaactg

SEQ ID NO: 107167 - DNA, 36 bp, Artificial Sequence
  primer
gtaaaacgacggccagtggccgctgagagaacaatc

SEQ ID NO: 107168 - DNA, 21 bp, Artificial Sequence
  primer
aggcccaaggctctttaactc

SEQ ID NO: 107169 - DNA, 38 bp, Artificial Sequence
  primer
gtaaaacgacggccagtctgaggagctggaggattctg

SEQ ID NO: 107170 - DNA, 21 bp, Artificial Sequence
  primer
cagataacctctgggctccac

SEQ ID NO: 107171 - DNA, 38 bp, Artificial Sequence
  primer
gtaaaacgacggccagtcacaggtctccattcctctcc

SEQ ID NO: 107172 - DNA, 38 bp, Artificial Sequence
  primer
gtaaaacgacggccagtgaattccaccagtcatagggc

SEQ ID NO: 107173 - DNA, 21 bp, Artificial Sequence
  primer
tgcatccctcctccttgtatg

SEQ ID NO: 107174 - DNA, 21 bp, Artificial Sequence
  primer
ggagggaaaccctaatccaag

SEQ ID NO: 107175 - DNA, 20 bp, Artificial Sequence
  primer
aacatgtctggagcagtcgg

SEQ ID NO: 107176 - DNA, 38 bp, Artificial Sequence
  primer
gtaaaacgacggccagtaaggcgttcataagtcttccg

SEQ ID NO: 107177 - DNA, 22 bp, Artificial Sequence
  primer
aatcctccttgtcctaattggc

SEQ ID NO: 107178 - DNA, 21 bp, Artificial Sequence
  primer
gcttctcatgatttgtcaggg

SEQ ID NO: 107179 - DNA, 21 bp, Artificial Sequence
  primer
gccagtgactttctctgaagc

SEQ ID NO: 107180 - DNA, 39 bp, Artificial Sequence
  primer
gtaaaacgacggccagtaggaaattgatgtaatccaccc

SEQ ID NO: 107181 - DNA, 21 bp, Artificial Sequence
  primer
ccaaatctcattcaacccagc

SEQ ID NO: 107182 - DNA, 43 bp, Artificial Sequence
  primer
gtaaaacgacggccagtcactatatggagactctcaaaccttg

SEQ ID NO: 107183 - DNA, 38 bp, Artificial Sequence
  primer
gtaaaacgacggccagttaccagacagggaaagctctg

SEQ ID NO: 107184 - DNA, 21 bp, Artificial Sequence
  primer
actggatgggcttaattgcag

SEQ ID NO: 107185 - DNA, 23 bp, Artificial Sequence
  primer
aacacatatgcatttctggattc

SEQ ID NO: 107186 - DNA, 37 bp, Artificial Sequence
  primer
gtaaaacgacggccagtagcaatatgcctggcaaaca

SEQ ID NO: 107187 - DNA, 21 bp, Artificial Sequence
  primer
agaggtaagggcagagggaag

SEQ ID NO: 107188 - DNA, 45 bp, Artificial Sequence
  primer
gtaaaacgacggccagttttacacagatacacttagactgccttt

SEQ ID NO: 107189 - DNA, 38 bp, Artificial Sequence
  primer
gtaaaacgacggccagttgcctaacaagtgcctgtctg

SEQ ID NO: 107190 - DNA, 40 bp, Artificial Sequence
  primer
gtaaaacgacggccagttcatactcaagcaaacattcacc

SEQ ID NO: 107191 - DNA, 42 bp, Artificial Sequence
  primer
gtaaaacgacggccagtgagtgcaggttatcaatgaactctt

SEQ ID NO: 107192 - DNA, 38 bp, Artificial Sequence
  primer
gtaaaacgacggccagtagaggccatgtcactttaccc

SEQ ID NO: 107193 - DNA, 22 bp, Artificial Sequence
  primer
cgtggaatgacactctgaaatg

SEQ ID NO: 107194 - DNA, 21 bp, Artificial Sequence
  primer
ttctctgccaaagagggtttg

SEQ ID NO: 107195 - DNA, 26 bp, Artificial Sequence
  primer
gacaatacaactttgtttccaagaac

SEQ ID NO: 107196 - DNA, 21 bp, Artificial Sequence
  primer
accaccacttggttctcttgg

SEQ ID NO: 107197 - DNA, 21 bp, Artificial Sequence
  primer
ataaagcctccctccttcacc

SEQ ID NO: 107198 - DNA, 21 bp, Artificial Sequence
  primer
ttgtgtgtgtgggttgtgaag

SEQ ID NO: 107199 - DNA, 18 bp, Artificial Sequence
  primer
gaggctcatcggccattc

SEQ ID NO: 107200 - DNA, 38 bp, Artificial Sequence
  primer
gtaaaacgacggccagtagactccggagaggaagaagg

SEQ ID NO: 107201 - DNA, 19 bp, Artificial Sequence
  primer
ggcggcagagtgagactgt

SEQ ID NO: 107202 - DNA, 21 bp, Artificial Sequence
  primer
tgcctgaatcagaaccttcac

SEQ ID NO: 107203 - DNA, 21 bp, Artificial Sequence
  primer
cacaatttggtccatggaatg

SEQ ID NO: 107204 - DNA, 21 bp, Artificial Sequence
  primer
ttcggtaacatatgccaggag

SEQ ID NO: 107205 - DNA, 21 bp, Artificial Sequence
  primer
aactctggcaaagaatgagcc

SEQ ID NO: 107206 - DNA, 38 bp, Artificial Sequence
  primer
gtaaaacgacggccagttggagacagccataactgtga

SEQ ID NO: 107207 - DNA, 38 bp, Artificial Sequence
  primer
gtaaaacgacggccagtcctcttgaccctgttgtctcc

SEQ ID NO: 107208 - DNA, 38 bp, Artificial Sequence
  primer
gtaaaacgacggccagtatccacatcaacagggaaagc

SEQ ID NO: 107209 - DNA, 20 bp, Artificial Sequence
  primer
atttgagggcgtctctcagg

SEQ ID NO: 107210 - DNA, 21 bp, Artificial Sequence
  primer
acgagcctaactactgcctcg

SEQ ID NO: 107211 - DNA, 21 bp, Artificial Sequence
  primer
tttgccctccctaagtcactc

SEQ ID NO: 107212 - DNA, 21 bp, Artificial Sequence
  primer
cactgggcctgactctcattc

SEQ ID NO: 107213 - DNA, 40 bp, Artificial Sequence
  primer
gtaaaacgacggccagtagtccagaaagcattagagcaag

SEQ ID NO: 107214 - DNA, 37 bp, Artificial Sequence
  primer
gtaaaacgacggccagtgctcgacctcatcagtcagg

SEQ ID NO: 107215 - DNA, 21 bp, Artificial Sequence
  primer
acctcctattgtcccatttcc

SEQ ID NO: 107216 - DNA, 25 bp, Artificial Sequence
  primer
ttgctctctacaaccacctgtattc

SEQ ID NO: 107217 - DNA, 21 bp, Artificial Sequence
  primer
gcaacacagccatgctaattc

SEQ ID NO: 107218 - DNA, 38 bp, Artificial Sequence
  primer
gtaaaacgacggccagttcctgctctcatgctctcaag

SEQ ID NO: 107219 - DNA, 42 bp, Artificial Sequence
  primer
gtaaaacgacggccagtaaatctggccaaatatgttatgaaa

SEQ ID NO: 107220 - DNA, 21 bp, Artificial Sequence
  primer
cagacagacagaatgtgccaa

SEQ ID NO: 107221 - DNA, 22 bp, Artificial Sequence
  primer
gaatgcactgagggaactacaa

SEQ ID NO: 107222 - DNA, 39 bp, Artificial Sequence
  primer
gtaaaacgacggccagttgtttcacaaatacccaacagg

SEQ ID NO: 107223 - DNA, 42 bp, Artificial Sequence
  primer
gtaaaacgacggccagttgtctccagatcaaatacctttctt

SEQ ID NO: 107224 - DNA, 24 bp, Artificial Sequence
  primer
tttgtctgtaccacctgtcagatt

SEQ ID NO: 107225 - DNA, 20 bp, Artificial Sequence
  primer
acagccacatgcaacacctc

SEQ ID NO: 107226 - DNA, 24 bp, Artificial Sequence
  primer
ccatgaacattatatcaccttccc

SEQ ID NO: 107227 - DNA, 39 bp, Artificial Sequence
  primer
gtaaaacgacggccagtgatatgctggattcactgcaag

SEQ ID NO: 107228 - DNA, 26 bp, Artificial Sequence
  primer
tgagaaagcttagtctagaaccttgg

SEQ ID NO: 107229 - DNA, 30 bp, Artificial Sequence
  primer
aaatgttatctaatatagcacggtttctaa

SEQ ID NO: 107230 - DNA, 38 bp, Artificial Sequence
  primer
gtaaaacgacggccagtctcccttcttccattcctgtg

SEQ ID NO: 107231 - DNA, 21 bp, Artificial Sequence
  primer
tcaaaccaacccaccaacata

SEQ ID NO: 107232 - DNA, 20 bp, Artificial Sequence
  primer
tccagcttgggcaacaatag

SEQ ID NO: 107233 - DNA, 20 bp, Artificial Sequence
  primer
acttatggctggctgccttc

SEQ ID NO: 107234 - DNA, 44 bp, Artificial Sequence
  primer
gtaaaacgacggccagtaatcaaattgaaatagttataccgtct

SEQ ID NO: 107235 - DNA, 21 bp, Artificial Sequence
  primer
cactgggcctgactctcattc

SEQ ID NO: 107236 - DNA, 18 bp, Artificial Sequence
  primer
cactcgcacacaaagccg

SEQ ID NO: 107237 - DNA, 19 bp, Artificial Sequence
  primer
actgggacagaggctgctc

SEQ ID NO: 107238 - DNA, 20 bp, Artificial Sequence
  primer
ctccatggacgaagcaagac

SEQ ID NO: 107239 - DNA, 19 bp, Artificial Sequence
  primer
gtgcgcactcagtcctgtc

SEQ ID NO: 107240 - DNA, 18 bp, Artificial Sequence
  primer
agggacctgcctgacacc

SEQ ID NO: 107241 - DNA, 21 bp, Artificial Sequence
  primer
agaggcctgagtacaggcaag

SEQ ID NO: 107242 - DNA, 38 bp, Artificial Sequence
  primer
gtaaaacgacggccagtgactttggccttagaggtccc

SEQ ID NO: 107243 - DNA, 21 bp, Artificial Sequence
  primer
atcctccaggtcagtcagtgg

SEQ ID NO: 107244 - DNA, 19 bp, Artificial Sequence
  primer
ctccacacactctggtccg

SEQ ID NO: 107245 - DNA, 37 bp, Artificial Sequence
  primer
gtaaaacgacggccagtgaatcggaggagggactctg

SEQ ID NO: 107246 - DNA, 21 bp, Artificial Sequence
  primer
acctgaggcagaggagttcag

SEQ ID NO: 107247 - DNA, 21 bp, Artificial Sequence
  primer
agttccagctgcttctccaag

SEQ ID NO: 107248 - DNA, 19 bp, Artificial Sequence
  primer
ctcctcaagagcaggctgg

SEQ ID NO: 107249 - DNA, 21 bp, Artificial Sequence
  primer
tccctgctcaacagtgtatcc

SEQ ID NO: 107250 - DNA, 20 bp, Artificial Sequence
  primer
gcctcgagttcaaagtgtgg

SEQ ID NO: 107251 - DNA, 38 bp, Artificial Sequence
  primer
gtaaaacgacggccagtcgtaaataaacagggcccaac

SEQ ID NO: 107252 - DNA, 38 bp, Artificial Sequence
  primer
gtaaaacgacggccagtaagtttgggcttctctccctg

SEQ ID NO: 107253 - DNA, 38 bp, Artificial Sequence
  primer
gtaaaacgacggccagtcttccgtaagcagacgacatc

SEQ ID NO: 107254 - DNA, 38 bp, Artificial Sequence
  primer
gtaaaacgacggccagtggtaccctagcagctccagac

SEQ ID NO: 107255 - DNA, 38 bp, Artificial Sequence
  primer
gtaaaacgacggccagtaatgggtctttcgctgatgtc

SEQ ID NO: 107256 - DNA, 38 bp, Artificial Sequence
  primer
gtaaaacgacggccagtcatcttggatgggatgctttc

SEQ ID NO: 107257 - DNA, 38 bp, Artificial Sequence
  primer
gtaaaacgacggccagtgtgcgacagacttgatatccg

SEQ ID NO: 107258 - DNA, 18 bp, Artificial Sequence
  primer
ctgtctgcagaggagccg

SEQ ID NO: 107259 - DNA, 38 bp, Artificial Sequence
  primer
gtaaaacgacggccagtaccgtgtatgccgtggagtag

SEQ ID NO: 107260 - DNA, 38 bp, Artificial Sequence
  primer
gtaaaacgacggccagtttacttggttctggtgcaagc

SEQ ID NO: 107261 - DNA, 38 bp, Artificial Sequence
  primer
gtaaaacgacggccagtggtgagtgaggacttgccatc

SEQ ID NO: 107262 - DNA, 21 bp, Artificial Sequence
  primer
agggctccgttctaccctaac

SEQ ID NO: 107263 - DNA, 23 bp, Artificial Sequence
  primer
tggaaagtcgggactatagcaag

SEQ ID NO: 107264 - DNA, 42 bp, Artificial Sequence
  primer
gtaaaacgacggccagtgaaataagtgctgaaactctttccc

SEQ ID NO: 107265 - DNA, 39 bp, Artificial Sequence
  primer
gtaaaacgacggccagtcatgtttgaagcaagccttaca

SEQ ID NO: 107266 - DNA, 21 bp, Artificial Sequence
  primer
cctggatactgaggacattcg

SEQ ID NO: 107267 - DNA, 37 bp, Artificial Sequence
  primer
gtaaaacgacggccagttcaggcaaaggtagggtgtg

SEQ ID NO: 107268 - DNA, 21 bp, Artificial Sequence
  primer
tctgatagcagaccctcctgc

SEQ ID NO: 107269 - DNA, 38 bp, Artificial Sequence
  primer
gtaaaacgacggccagtaacggtacccacataacgacc

SEQ ID NO: 107270 - DNA, 21 bp, Artificial Sequence
  primer
ttaaattcccgctggagtcag

SEQ ID NO: 107271 - DNA, 22 bp, Artificial Sequence
  primer
acctcatcttaagtccgtttgg

SEQ ID NO: 107272 - DNA, 22 bp, Artificial Sequence
  primer
ccggagaagcattatcaattcc

SEQ ID NO: 107273 - DNA, 22 bp, Artificial Sequence
  primer
aaactaagtgacaggccattcc

SEQ ID NO: 107274 - DNA, 40 bp, Artificial Sequence
  primer
gtaaaacgacggccagttggtgacattcctcataatccac

SEQ ID NO: 107275 - DNA, 21 bp, Artificial Sequence
  primer
aaccctttccaaacaatggag

SEQ ID NO: 107276 - DNA, 21 bp, Artificial Sequence
  primer
aagggcattaatgagcggaat

SEQ ID NO: 107277 - DNA, 38 bp, Artificial Sequence
  primer
gtaaaacgacggccagtcatggcttagttcccacatcc

SEQ ID NO: 107278 - DNA, 22 bp, Artificial Sequence
  primer
ttcacagtaaaccctcagggac

SEQ ID NO: 107279 - DNA, 38 bp, Artificial Sequence
  primer
gtaaaacgacggccagttcctctagagcgtggaactgc

SEQ ID NO: 107280 - DNA, 21 bp, Artificial Sequence
  primer
ttatttcgcatcagggttgtg

SEQ ID NO: 107281 - DNA, 22 bp, Artificial Sequence
  primer
ttaccatcacctgcccataaag

SEQ ID NO: 107282 - DNA, 25 bp, Artificial Sequence
  primer
tgtagaaacaggtggattcacattc

SEQ ID NO: 107283 - DNA, 27 bp, Artificial Sequence
  primer
aaagcctgtttgtaacagattctactg

SEQ ID NO: 107284 - DNA, 27 bp, Artificial Sequence
  primer
gcagactctcttactgctaaataaagg

SEQ ID NO: 107285 - DNA, 38 bp, Artificial Sequence
  primer
gtaaaacgacggccagtatcagggccagtactttgcag

SEQ ID NO: 107286 - DNA, 38 bp, Artificial Sequence
  primer
gtaaaacgacggccagtaggtggtagagaatcccaccc

SEQ ID NO: 107287 - DNA, 38 bp, Artificial Sequence
  primer
gtaaaacgacggccagttggtgtgacactgtcctcctg

SEQ ID NO: 107288 - DNA, 38 bp, Artificial Sequence
  primer
gtaaaacgacggccagtctggacagtaacactcggcac

SEQ ID NO: 107289 - DNA, 38 bp, Artificial Sequence
  primer
gtaaaacgacggccagttgttgaggagcatttcacacc

SEQ ID NO: 107290 - DNA, 20 bp, Artificial Sequence
  primer
ctttatcgctccctcaccag

SEQ ID NO: 107291 - DNA, 37 bp, Artificial Sequence
  primer
gtaaaacgacggccagttgttcccagcacagcttctc

SEQ ID NO: 107292 - DNA, 21 bp, Artificial Sequence
  primer
gtcccataagtcatccgtgtg

SEQ ID NO: 107293 - DNA, 20 bp, Artificial Sequence
  primer
aggctgacctacgggaaatc

SEQ ID NO: 107294 - DNA, 21 bp, Artificial Sequence
  primer
ttcccttacctctcacaaccc

SEQ ID NO: 107295 - DNA, 21 bp, Artificial Sequence
  primer
gaatggcgtgaactctggaag

SEQ ID NO: 107296 - DNA, 21 bp, Artificial Sequence
  primer
aaagcccaaattgaaacaacc

SEQ ID NO: 107297 - DNA, 22 bp, Artificial Sequence
  primer
gctgtcgctggataagtcaaag

SEQ ID NO: 107298 - DNA, 38 bp, Artificial Sequence
  primer
gtaaaacgacggccagttcctccaggtagatgaggtgg

SEQ ID NO: 107299 - DNA, 37 bp, Artificial Sequence
  primer
gtaaaacgacggccagtgctcccgcgtcttctctatc

SEQ ID NO: 107300 - DNA, 21 bp, Artificial Sequence
  primer
ctaaggagtgcctgcaaggag

SEQ ID NO: 107301 - DNA, 20 bp, Artificial Sequence
  primer
caggtgcatgaaccaacagc

SEQ ID NO: 107302 - DNA, 21 bp, Artificial Sequence
  primer
caaggtggaagcaggagtcac

SEQ ID NO: 107303 - DNA, 40 bp, Artificial Sequence
  primer
gtaaaacgacggccagttcccaaaccagacacaactacac

SEQ ID NO: 107304 - DNA, 21 bp, Artificial Sequence
  primer
gtgtcacacacagaatggtgg

SEQ ID NO: 107305 - DNA, 20 bp, Artificial Sequence
  primer
tcctttgggaagaaagcagc

SEQ ID NO: 107306 - DNA, 20 bp, Artificial Sequence
  primer
tcctttgggaagaaagcagc

SEQ ID NO: 107307 - DNA, 38 bp, Artificial Sequence
  primer
gtaaaacgacggccagtttcaaactctctccctgctcc

SEQ ID NO: 107308 - DNA, 38 bp, Artificial Sequence
  primer
gtaaaacgacggccagttcctactctgcacctttcagg

SEQ ID NO: 107309 - DNA, 21 bp, Artificial Sequence
  primer
aaagagctgctggagttggag

SEQ ID NO: 107310 - DNA, 38 bp, Artificial Sequence
  primer
gtaaaacgacggccagttgtatccaattcccatccgag

SEQ ID NO: 107311 - DNA, 38 bp, Artificial Sequence
  primer
gtaaaacgacggccagtctactgggtctgcgtactggg

SEQ ID NO: 107312 - DNA, 21 bp, Artificial Sequence
  primer
caatgaatgcaggaaggactg

SEQ ID NO: 107313 - DNA, 36 bp, Artificial Sequence
  primer
gtaaaacgacggccagtaaaggcctgggcagtcttc

SEQ ID NO: 107314 - DNA, 35 bp, Artificial Sequence
  primer
gtaaaacgacggccagtgctggctctaagccctgg

SEQ ID NO: 107315 - DNA, 38 bp, Artificial Sequence
  primer
gtaaaacgacggccagtttcaggcaaagcttccttgtc

SEQ ID NO: 107316 - DNA, 21 bp, Artificial Sequence
  primer
caaggactatgcacatcaccc

SEQ ID NO: 107317 - DNA, 21 bp, Artificial Sequence
  primer
gctgccttacacatctgttgc

SEQ ID NO: 107318 - DNA, 20 bp, Artificial Sequence
  primer
agaacccaagccctgagatg

SEQ ID NO: 107319 - DNA, 21 bp, Artificial Sequence
  primer
tcacagggtcggcatactagg

SEQ ID NO: 107320 - DNA, 38 bp, Artificial Sequence
  primer
gtaaaacgacggccagttgtacttctctggtggagccc

SEQ ID NO: 107321 - DNA, 38 bp, Artificial Sequence
  primer
gtaaaacgacggccagtcagttacttcccgctgtttcc

SEQ ID NO: 107322 - DNA, 39 bp, Artificial Sequence
  primer
gtaaaacgacggccagtgaggtccttcccagagagaaag

SEQ ID NO: 107323 - DNA, 35 bp, Artificial Sequence
  primer
gtaaaacgacggccagtgtcggcacacgcactctg

SEQ ID NO: 107324 - DNA, 38 bp, Artificial Sequence
  primer
gtaaaacgacggccagtgcctggctctgcatattcttc

SEQ ID NO: 107325 - DNA, 22 bp, Artificial Sequence
  primer
ttcacctgggttaataagcagc

SEQ ID NO: 107326 - DNA, 38 bp, Artificial Sequence
  primer
gtaaaacgacggccagtatttgaacttgcaaccgcatc

SEQ ID NO: 107327 - DNA, 20 bp, Artificial Sequence
  primer
aaggctttcagactggcacc

SEQ ID NO: 107328 - DNA, 38 bp, Artificial Sequence
  primer
gtaaaacgacggccagtaaaggcccagagaccttcttg

SEQ ID NO: 107329 - DNA, 20 bp, Artificial Sequence
  primer
gtaggcatggccacattcac

SEQ ID NO: 107330 - DNA, 21 bp, Artificial Sequence
  primer
ttacccaaggcttcagattcc

SEQ ID NO: 107331 - DNA, 21 bp, Artificial Sequence
  primer
ttggttaggtttgcacagcac

SEQ ID NO: 107332 - DNA, 38 bp, Artificial Sequence
  primer
gtaaaacgacggccagtctccagtcttggagaagccac

SEQ ID NO: 107333 - DNA, 39 bp, Artificial Sequence
  primer
gtaaaacgacggccagtaaatgcttgaggacagcttgag

SEQ ID NO: 107334 - DNA, 38 bp, Artificial Sequence
  primer
gtaaaacgacggccagtaatgtgttgactggctgttgc

SEQ ID NO: 107335 - DNA, 21 bp, Artificial Sequence
  primer
cttcccaggacccactatttg

SEQ ID NO: 107336 - DNA, 21 bp, Artificial Sequence
  primer
gtcaccctgaaagctagtgcc

SEQ ID NO: 107337 - DNA, 38 bp, Artificial Sequence
  primer
gtaaaacgacggccagtccctgcatgagtagagcttcc

SEQ ID NO: 107338 - DNA, 21 bp, Artificial Sequence
  primer
cacagctaggaggtggagatg

SEQ ID NO: 107339 - DNA, 21 bp, Artificial Sequence
  primer
aaagctgagatgggaaacacg

SEQ ID NO: 107340 - DNA, 21 bp, Artificial Sequence
  primer
ctgcagctgtctcagctatcc

SEQ ID NO: 107341 - DNA, 38 bp, Artificial Sequence
  primer
gtaaaacgacggccagtcctaccctcattctgtcaccc

SEQ ID NO: 107342 - DNA, 21 bp, Artificial Sequence
  primer
gtcagaatggtgcctctttcc

SEQ ID NO: 107343 - DNA, 21 bp, Artificial Sequence
  primer
tctgtcaatatggccacaagc

SEQ ID NO: 107344 - DNA, 38 bp, Artificial Sequence
  primer
gtaaaacgacggccagtcgctcactcgttacctgacac

SEQ ID NO: 107345 - DNA, 38 bp, Artificial Sequence
  primer
gtaaaacgacggccagttgatcgaggacctctgtgatg

SEQ ID NO: 107346 - DNA, 18 bp, Artificial Sequence
  primer
gcgacacactgcgtccag

SEQ ID NO: 107347 - DNA, 20 bp, Artificial Sequence
  primer
gaaggagagacggaacccag

SEQ ID NO: 107348 - DNA, 38 bp, Artificial Sequence
  primer
gtaaaacgacggccagttgcacctaaggaccctgattc

SEQ ID NO: 107349 - DNA, 21 bp, Artificial Sequence
  primer
gagcatcgcagattagctagg

SEQ ID NO: 107350 - DNA, 21 bp, Artificial Sequence
  primer
aaggaagggatccgagttcac

SEQ ID NO: 107351 - DNA, 18 bp, Artificial Sequence
  primer
gtccagcacgaggctcac

SEQ ID NO: 107352 - DNA, 38 bp, Artificial Sequence
  primer
gtaaaacgacggccagtgaaagaaactcagtccgagcg

SEQ ID NO: 107353 - DNA, 19 bp, Artificial Sequence
  primer
cggtcggcacagttaggac

SEQ ID NO: 107354 - DNA, 38 bp, Artificial Sequence
  primer
gtaaaacgacggccagtactaacaagcgtggcaagagc

SEQ ID NO: 107355 - DNA, 38 bp, Artificial Sequence
  primer
gtaaaacgacggccagtttgaattgggtgggaatcttt

SEQ ID NO: 107356 - DNA, 18 bp, Artificial Sequence
  primer
tttccttccaccacgacg

SEQ ID NO: 107357 - DNA, 38 bp, Artificial Sequence
  primer
gtaaaacgacggccagttggtaaggctgtgaaatcgaa

SEQ ID NO: 107358 - DNA, 21 bp, Artificial Sequence
  primer
gggctttcctctctttgtctg

SEQ ID NO: 107359 - DNA, 41 bp, Artificial Sequence
  primer
gtaaaacgacggccagtcagatactacacacacttgtcggg

SEQ ID NO: 107360 - DNA, 38 bp, Artificial Sequence
  primer
gtaaaacgacggccagtaaacatctttcggttgccttc

SEQ ID NO: 107361 - DNA, 38 bp, Artificial Sequence
  primer
gtaaaacgacggccagtttcagttccacattctgtgcc

SEQ ID NO: 107362 - DNA, 22 bp, Artificial Sequence
  primer
tccagaacatggaccctaagtg

SEQ ID NO: 107363 - DNA, 22 bp, Artificial Sequence
  primer
ttgatgtttccaatggcataaa

SEQ ID NO: 107364 - DNA, 21 bp, Artificial Sequence
  primer
cagccctgagaactggtaagc

SEQ ID NO: 107365 - DNA, 22 bp, Artificial Sequence
  primer
tggccaactttaatcctcttct

SEQ ID NO: 107366 - DNA, 39 bp, Artificial Sequence
  primer
gtaaaacgacggccagtgaatgccatcacttcacatcac

SEQ ID NO: 107367 - DNA, 21 bp, Artificial Sequence
  primer
tcttctttccacctgacccac

SEQ ID NO: 107368 - DNA, 41 bp, Artificial Sequence
  primer
gtaaaacgacggccagtcccaatgcatttcatgataaagag

SEQ ID NO: 107369 - DNA, 21 bp, Artificial Sequence
  primer
tcagggtctccatcttgacag

SEQ ID NO: 107370 - DNA, 25 bp, Artificial Sequence
  primer
ccatcctttaaatatgcactttgac

SEQ ID NO: 107371 - DNA, 37 bp, Artificial Sequence
  primer
gtaaaacgacggccagtgcaaaggctcattgttggtc

SEQ ID NO: 107372 - DNA, 39 bp, Artificial Sequence
  primer
gtaaaacgacggccagtacagctgtacagacagacaccc

SEQ ID NO: 107373 - DNA, 27 bp, Artificial Sequence
  primer
aaagtcacatgctacctacttctcttt

SEQ ID NO: 107374 - DNA, 22 bp, Artificial Sequence
  primer
tgaaccaacatgatagtgggac

SEQ ID NO: 107375 - DNA, 22 bp, Artificial Sequence
  primer
tgtgaaatcacactttggtctg

SEQ ID NO: 107376 - DNA, 38 bp, Artificial Sequence
  primer
gtaaaacgacggccagtgggagagtaaggagggtcgtc

SEQ ID NO: 107377 - DNA, 22 bp, Artificial Sequence
  primer
tcaccagtttgttggagaacag

SEQ ID NO: 107378 - DNA, 38 bp, Artificial Sequence
  primer
gtaaaacgacggccagttgagacactgccactcctcag

SEQ ID NO: 107379 - DNA, 20 bp, Artificial Sequence
  primer
cccaaagtgttggaatttcg

SEQ ID NO: 107380 - DNA, 38 bp, Artificial Sequence
  primer
gtaaaacgacggccagtcaggtacgtgaggtagcggtc

SEQ ID NO: 107381 - DNA, 21 bp, Artificial Sequence
  primer
gcagtcaccatcttgaagcac

SEQ ID NO: 107382 - DNA, 38 bp, Artificial Sequence
  primer
gtaaaacgacggccagtccatcaggacacccttgtagg

SEQ ID NO: 107383 - DNA, 19 bp, Artificial Sequence
  primer
gggaaggaggacaaggctc

SEQ ID NO: 107384 - DNA, 21 bp, Artificial Sequence
  primer
tcatgaacagactccaccctc

SEQ ID NO: 107385 - DNA, 20 bp, Artificial Sequence
  primer
ggattacaggcatgcacctc

SEQ ID NO: 107386 - DNA, 21 bp, Artificial Sequence
  primer
cagaatgatcactgcaaaggg

SEQ ID NO: 107387 - DNA, 21 bp, Artificial Sequence
  primer
aaggagcacatgacgtatccc

SEQ ID NO: 107388 - DNA, 38 bp, Artificial Sequence
  primer
gtaaaacgacggccagtagctgcaggtcacttctaggc

SEQ ID NO: 107389 - DNA, 21 bp, Artificial Sequence
  primer
gaaggcctggtcaagttgaag

SEQ ID NO: 107390 - DNA, 21 bp, Artificial Sequence
  primer
acacggatgatctgcacaatg

SEQ ID NO: 107391 - DNA, 38 bp, Artificial Sequence
  primer
gtaaaacgacggccagtgacagaaacccatcactgctc

SEQ ID NO: 107392 - DNA, 38 bp, Artificial Sequence
  primer
gtaaaacgacggccagtagggagagatcagacccactg

SEQ ID NO: 107393 - DNA, 38 bp, Artificial Sequence
  primer
gtaaaacgacggccagtaagtttgcccaacaggaagag

SEQ ID NO: 107394 - DNA, 21 bp, Artificial Sequence
  primer
gcgaagggttctggatatagg

SEQ ID NO: 107395 - DNA, 22 bp, Artificial Sequence
  primer
cccacctctgacctctatccac

SEQ ID NO: 107396 - DNA, 20 bp, Artificial Sequence
  primer
aaaccaggaagacaggctgg

SEQ ID NO: 107397 - DNA, 38 bp, Artificial Sequence
  primer
gtaaaacgacggccagttgataggacttcaggtgagcc

SEQ ID NO: 107398 - DNA, 38 bp, Artificial Sequence
  primer
gtaaaacgacggccagtaatcactgcctttgactgctg

SEQ ID NO: 107399 - DNA, 39 bp, Artificial Sequence
  primer
gtaaaacgacggccagtcaaggctaccatgtggtacaga

SEQ ID NO: 107400 - DNA, 39 bp, Artificial Sequence
  primer
gtaaaacgacggccagtgcgttctttaccactgtccttc

SEQ ID NO: 107401 - DNA, 18 bp, Artificial Sequence
  primer
ttgggttccgcatccaac

SEQ ID NO: 107402 - DNA, 38 bp, Artificial Sequence
  primer
gtaaaacgacggccagtcaatcgaaggctctgttaccg

SEQ ID NO: 107403 - DNA, 22 bp, Artificial Sequence
  primer
ctttatgctctccaatctgcaa

SEQ ID NO: 107404 - DNA, 26 bp, Artificial Sequence
  primer
tgctctcaaattatactctattgccc

SEQ ID NO: 107405 - DNA, 21 bp, Artificial Sequence
  primer
gtgtcaagatctgcaactggg

SEQ ID NO: 107406 - DNA, 21 bp, Artificial Sequence
  primer
caaatcaaccaaccaaccaac

SEQ ID NO: 107407 - DNA, 21 bp, Artificial Sequence
  primer
tgagggagcagagtatttggg

SEQ ID NO: 107408 - DNA, 35 bp, Artificial Sequence
  primer
gtaaaacgacggccagttctccgtgttggtcaggc

SEQ ID NO: 107409 - DNA, 40 bp, Artificial Sequence
  primer
gtaaaacgacggccagtttgctcttatggttgttacccag

SEQ ID NO: 107410 - DNA, 21 bp, Artificial Sequence
  primer
tgagcaattggcaagcataag

SEQ ID NO: 107411 - DNA, 43 bp, Artificial Sequence
  primer
gtaaaacgacggccagtctaaggaatactgaactaaggaaggc

SEQ ID NO: 107412 - DNA, 22 bp, Artificial Sequence
  primer
aatggaactatattggcgaagg

SEQ ID NO: 107413 - DNA, 23 bp, Artificial Sequence
  primer
tcatcagaagccttgatcacttt

SEQ ID NO: 107414 - DNA, 24 bp, Artificial Sequence
  primer
caaggagtcaaggacatatttggt

SEQ ID NO: 107415 - DNA, 25 bp, Artificial Sequence
  primer
cttattcagtccaacacagtgagac

SEQ ID NO: 107416 - DNA, 21 bp, Artificial Sequence
  primer
tgttgtatgttaagcgagccc

SEQ ID NO: 107417 - DNA, 39 bp, Artificial Sequence
  primer
gtaaaacgacggccagtttctgtgtcagtgatctgtccc

SEQ ID NO: 107418 - DNA, 21 bp, Artificial Sequence
  primer
aagacatagcagtgtttgccc

SEQ ID NO: 107419 - DNA, 21 bp, Artificial Sequence
  primer
actcctccttcctcaccacag

SEQ ID NO: 107420 - DNA, 21 bp, Artificial Sequence
  primer
aatatactgccaccgcatctg

SEQ ID NO: 107421 - DNA, 20 bp, Artificial Sequence
  primer
ttcctggaaacaagaaaggg

SEQ ID NO: 107422 - DNA, 21 bp, Artificial Sequence
  primer
agaagattgtccacaaagccc

SEQ ID NO: 107423 - DNA, 21 bp, Artificial Sequence
  primer
ctgtggcccatgaaacttacc

SEQ ID NO: 107424 - DNA, 38 bp, Artificial Sequence
  primer
gtaaaacgacggccagtcttggagtttctgcacagcac

SEQ ID NO: 107425 - DNA, 21 bp, Artificial Sequence
  primer
ctggttcagtctgcccatttc

SEQ ID NO: 107426 - DNA, 21 bp, Artificial Sequence
  primer
gagattgcccatagttcaggc

SEQ ID NO: 107427 - DNA, 22 bp, Artificial Sequence
  primer
accacatccagcaaacattaaa

SEQ ID NO: 107428 - DNA, 22 bp, Artificial Sequence
  primer
tgaactgatctggtgagcaatg

SEQ ID NO: 107429 - DNA, 21 bp, Artificial Sequence
  primer
agggcatttgatagcaagcag

SEQ ID NO: 107430 - DNA, 21 bp, Artificial Sequence
  primer
gtggcccttcatcctcaatac

SEQ ID NO: 107431 - DNA, 39 bp, Artificial Sequence
  primer
gtaaaacgacggccagttctttggtaaacacctggtctg

SEQ ID NO: 107432 - DNA, 38 bp, Artificial Sequence
  primer
gtaaaacgacggccagtatctccaagaagacaccctgg

SEQ ID NO: 107433 - DNA, 40 bp, Artificial Sequence
  primer
gtaaaacgacggccagtaaaggaaagaatgattccaggac

SEQ ID NO: 107434 - DNA, 21 bp, Artificial Sequence
  primer
gctgccatggtaattctgaag

SEQ ID NO: 107435 - DNA, 38 bp, Artificial Sequence
  primer
gtaaaacgacggccagtgatccatgacatttgcgagac

SEQ ID NO: 107436 - DNA, 39 bp, Artificial Sequence
  primer
gtaaaacgacggccagtcacccattccacaattatgtgc

SEQ ID NO: 107437 - DNA, 38 bp, Artificial Sequence
  primer
gtaaaacgacggccagtatgcatgcaacaagtaggcag

SEQ ID NO: 107438 - DNA, 22 bp, Artificial Sequence
  primer
tgagagcacagatttctgaccc

SEQ ID NO: 107439 - DNA, 21 bp, Artificial Sequence
  primer
taataccaccaccttgcgttg

SEQ ID NO: 107440 - DNA, 21 bp, Artificial Sequence
  primer
tagcacagtgtcaggagaggc

SEQ ID NO: 107441 - DNA, 22 bp, Artificial Sequence
  primer
agcagtactgttgccaagaatg

SEQ ID NO: 107442 - DNA, 20 bp, Artificial Sequence
  primer
atacgagctggcaggtatgc

SEQ ID NO: 107443 - DNA, 27 bp, Artificial Sequence
  primer
cacatcttaacaactctttaaaggaca

SEQ ID NO: 107444 - DNA, 20 bp, Artificial Sequence
  primer
tcccacagctagctcctcac

SEQ ID NO: 107445 - DNA, 36 bp, Artificial Sequence
  primer
gtaaaacgacggccagttaggatcgacgccaggttc

SEQ ID NO: 107446 - DNA, 38 bp, Artificial Sequence
  primer
gtaaaacgacggccagtaagtttcctcagacccacctg

SEQ ID NO: 107447 - DNA, 38 bp, Artificial Sequence
  primer
gtaaaacgacggccagttaaacgccaacatgtggatct

SEQ ID NO: 107448 - DNA, 25 bp, Artificial Sequence
  primer
tttgtatacggaaagtatctcagcc

SEQ ID NO: 107449 - DNA, 40 bp, Artificial Sequence
  primer
gtaaaacgacggccagtaagaaacaaatatgcctgcaatg

SEQ ID NO: 107450 - DNA, 38 bp, Artificial Sequence
  primer
gtaaaacgacggccagtactttggccagactctgctgt

SEQ ID NO: 107451 - DNA, 18 bp, Artificial Sequence
  primer
gtcagtcgagattgcgcc

SEQ ID NO: 107452 - DNA, 38 bp, Artificial Sequence
  primer
gtaaaacgacggccagtaccatgcctgtcccagtatta

SEQ ID NO: 107453 - DNA, 38 bp, Artificial Sequence
  primer
gtaaaacgacggccagtgcataaccaaagtgtgcaagc

SEQ ID NO: 107454 - DNA, 38 bp, Artificial Sequence
  primer
gtaaaacgacggccagtcatttcttgcagtcatcccag

SEQ ID NO: 107455 - DNA, 22 bp, Artificial Sequence
  primer
ccatgtgcttcacagaactagc

SEQ ID NO: 107456 - DNA, 22 bp, Artificial Sequence
  primer
tggcacttgacactcagagaat

SEQ ID NO: 107457 - DNA, 42 bp, Artificial Sequence
  primer
gtaaaacgacggccagttttgcctaaatcaatgttctaatgg

SEQ ID NO: 107458 - DNA, 24 bp, Artificial Sequence
  primer
ttggtcatgtaaacaagggtgtag

SEQ ID NO: 107459 - DNA, 19 bp, Artificial Sequence
  primer
tttgttgatttagcgccca

SEQ ID NO: 107460 - DNA, 37 bp, Artificial Sequence
  primer
gtaaaacgacggccagtattatccagtctctcgccgc

SEQ ID NO: 107461 - DNA, 38 bp, Artificial Sequence
  primer
gtaaaacgacggccagtggcctttaatgtctgaggcag

SEQ ID NO: 107462 - DNA, 38 bp, Artificial Sequence
  primer
gtaaaacgacggccagtttcttcatcgacacacaagcc

SEQ ID NO: 107463 - DNA, 38 bp, Artificial Sequence
  primer
gtaaaacgacggccagtccagtccaaacaatcctaacg

SEQ ID NO: 107464 - DNA, 47 bp, Artificial Sequence
  primer
gtaaaacgacggccagtgagatttaactattcaggcctatgttctaa

SEQ ID NO: 107465 - DNA, 21 bp, Artificial Sequence
  primer
cttgggaggatgaagcacaag

SEQ ID NO: 107466 - DNA, 20 bp, Artificial Sequence
  primer
tggccaactaggagggaaag

SEQ ID NO: 107467 - DNA, 35 bp, Artificial Sequence
  primer
gtaaaacgacggccagtgcctggcctcaaaggaaa

SEQ ID NO: 107468 - DNA, 38 bp, Artificial Sequence
  primer
gtaaaacgacggccagtttagaggccagactgttgcag

SEQ ID NO: 107469 - DNA, 22 bp, Artificial Sequence
  primer
tgttctggcacactaccaacag

SEQ ID NO: 107470 - DNA, 21 bp, Artificial Sequence
  primer
tcatttgcagttgaggtttgg

SEQ ID NO: 107471 - DNA, 37 bp, Artificial Sequence
  primer
gtaaaacgacggccagtgcagcaacaggcaacaagag

SEQ ID NO: 107472 - DNA, 21 bp, Artificial Sequence
  primer
tggcttgctcctatgaaacag

SEQ ID NO: 107473 - DNA, 22 bp, Artificial Sequence
  primer
tgtgtcttgttgttgcattcac

SEQ ID NO: 107474 - DNA, 21 bp, Artificial Sequence
  primer
tcattgcaagccatctacctt

SEQ ID NO: 107475 - DNA, 22 bp, Artificial Sequence
  primer
aagcttgtcatcgtctttcagc

SEQ ID NO: 107476 - DNA, 21 bp, Artificial Sequence
  primer
aataaattgcccttctgtggg

SEQ ID NO: 107477 - DNA, 21 bp, Artificial Sequence
  primer
tccatctgaagctggaaagag

SEQ ID NO: 107478 - DNA, 41 bp, Artificial Sequence
  primer
gtaaaacgacggccagtgagacagttgggatatttggtttg

SEQ ID NO: 107479 - DNA, 38 bp, Artificial Sequence
  primer
gtaaaacgacggccagtgcctgacaagtaagcagggag

SEQ ID NO: 107480 - DNA, 41 bp, Artificial Sequence
  primer
gtaaaacgacggccagttccacagttcagcatttacctaag

SEQ ID NO: 107481 - DNA, 38 bp, Artificial Sequence
  primer
gtaaaacgacggccagttgcagccttattaaccaccac

SEQ ID NO: 107482 - DNA, 21 bp, Artificial Sequence
  primer
atccactggtgaactgggaag

SEQ ID NO: 107483 - DNA, 37 bp, Artificial Sequence
  primer
gtaaaacgacggccagtagaaaccattcccacaaccc

SEQ ID NO: 107484 - DNA, 39 bp, Artificial Sequence
  primer
gtaaaacgacggccagttcttggctgcaaactgaatagg

SEQ ID NO: 107485 - DNA, 21 bp, Artificial Sequence
  primer
aaggagaccttccatcccttc

SEQ ID NO: 107486 - DNA, 21 bp, Artificial Sequence
  primer
cagccatccaacagctagaga

SEQ ID NO: 107487 - DNA, 23 bp, Artificial Sequence
  primer
gaaagaagttcaggatcctttgg

SEQ ID NO: 107488 - DNA, 22 bp, Artificial Sequence
  primer
gtgaaatgtgaaatctcctccc

SEQ ID NO: 107489 - DNA, 38 bp, Artificial Sequence
  primer
gtaaaacgacggccagtgcagctgcatatgtcgctaag

SEQ ID NO: 107490 - DNA, 21 bp, Artificial Sequence
  primer
agggaaacatcaatgcaaatg

SEQ ID NO: 107491 - DNA, 36 bp, Artificial Sequence
  primer
gtaaaacgacggccagtgagcaaaccggctcttctg

SEQ ID NO: 107492 - DNA, 37 bp, Artificial Sequence
  primer
gtaaaacgacggccagtaccactcccaccctaccaac

SEQ ID NO: 107493 - DNA, 21 bp, Artificial Sequence
  primer
agaagcagccctagagccaag

SEQ ID NO: 107494 - DNA, 38 bp, Artificial Sequence
  primer
gtaaaacgacggccagttggagctacgctttctaaggg

SEQ ID NO: 107495 - DNA, 22 bp, Artificial Sequence
  primer
gccaattataaacgcaccactg

SEQ ID NO: 107496 - DNA, 21 bp, Artificial Sequence
  primer
agaagggatgaatcgaaaggg

SEQ ID NO: 107497 - DNA, 40 bp, Artificial Sequence
  primer
gtaaaacgacggccagtcagacaagcttagtatttggccc

SEQ ID NO: 107498 - DNA, 22 bp, Artificial Sequence
  primer
cctgtgtaataaaccacagccc

SEQ ID NO: 107499 - DNA, 21 bp, Artificial Sequence
  primer
taaggattgcccaagatttgc

SEQ ID NO: 107500 - DNA, 38 bp, Artificial Sequence
  primer
gtaaaacgacggccagtgcctctacctgacacagtccc

SEQ ID NO: 107501 - DNA, 38 bp, Artificial Sequence
  primer
gtaaaacgacggccagtcagtttgggagcagaaggaag

SEQ ID NO: 107502 - DNA, 22 bp, Artificial Sequence
  primer
catatggcccagcataacagtc

SEQ ID NO: 107503 - DNA, 37 bp, Artificial Sequence
  primer
gtaaaacgacggccagtaaagcagcacagggagtgag

SEQ ID NO: 107504 - DNA, 38 bp, Artificial Sequence
  primer
gtaaaacgacggccagtcttgcagcacatggcttattc

SEQ ID NO: 107505 - DNA, 23 bp, Artificial Sequence
  primer
catgctcttgaattcaggctaac

SEQ ID NO: 107506 - DNA, 38 bp, Artificial Sequence
  primer
gtaaaacgacggccagttggtgcaacaaaggctatcag

SEQ ID NO: 107507 - DNA, 21 bp, Artificial Sequence
  primer
ctttgacacgcaaagcaacag

SEQ ID NO: 107508 - DNA, 38 bp, Artificial Sequence
  primer
gtaaaacgacggccagtcactgctgcccttacctatcc

SEQ ID NO: 107509 - DNA, 38 bp, Artificial Sequence
  primer
gtaaaacgacggccagtttccctgagtgagagtccacc

SEQ ID NO: 107510 - DNA, 38 bp, Artificial Sequence
  primer
gtaaaacgacggccagtaccagggatactgacagaggc

SEQ ID NO: 107511 - DNA, 21 bp, Artificial Sequence
  primer
gtcctgaagtagctgctgtgg

SEQ ID NO: 107512 - DNA, 19 bp, Artificial Sequence
  primer
aaatccctggaagaacggg

SEQ ID NO: 107513 - DNA, 39 bp, Artificial Sequence
  primer
gtaaaacgacggccagtcgagtatgtacaatgtgccagg

SEQ ID NO: 107514 - DNA, 22 bp, Artificial Sequence
  primer
aatggcatatcagtcctccatc

SEQ ID NO: 107515 - DNA, 21 bp, Artificial Sequence
  primer
tagcccataaggctctggatg

SEQ ID NO: 107516 - DNA, 21 bp, Artificial Sequence
  primer
gccacgagtatctctgatccc

SEQ ID NO: 107517 - DNA, 21 bp, Artificial Sequence
  primer
ccttaggcctagaactcaccg

SEQ ID NO: 107518 - DNA, 20 bp, Artificial Sequence
  primer
acagccaccagttcacaacc

SEQ ID NO: 107519 - DNA, 24 bp, Artificial Sequence
  primer
tggaggctaaagaataggctaaag

SEQ ID NO: 107520 - DNA, 36 bp, Artificial Sequence
  primer
gtaaaacgacggccagtcccaggaagcagaagttgc

SEQ ID NO: 107521 - DNA, 38 bp, Artificial Sequence
  primer
gtaaaacgacggccagtaccaggcagactcccatactg

SEQ ID NO: 107522 - DNA, 39 bp, Artificial Sequence
  primer
gtaaaacgacggccagttgcagcttcccaatactttcac

SEQ ID NO: 107523 - DNA, 39 bp, Artificial Sequence
  primer
gtaaaacgacggccagtggaacaaattacaaatggcagc

SEQ ID NO: 107524 - DNA, 37 bp, Artificial Sequence
  primer
gtaaaacgacggccagtgagggtccttcccttcagtc

SEQ ID NO: 107525 - DNA, 25 bp, Artificial Sequence
  primer
gcaatagctcttcacacattacacg

SEQ ID NO: 107526 - DNA, 23 bp, Artificial Sequence
  primer
ggtttagcatgatggtgaaatgg

SEQ ID NO: 107527 - DNA, 21 bp, Artificial Sequence
  primer
ctgcgttaggatcctggagtg

SEQ ID NO: 107528 - DNA, 38 bp, Artificial Sequence
  primer
gtaaaacgacggccagtgaataacggcccaagaaatcc

SEQ ID NO: 107529 - DNA, 38 bp, Artificial Sequence
  primer
gtaaaacgacggccagttgcatgtcccagactcgtaag

SEQ ID NO: 107530 - DNA, 38 bp, Artificial Sequence
  primer
gtaaaacgacggccagttgggagttgatggaaagaagg

SEQ ID NO: 107531 - DNA, 21 bp, Artificial Sequence
  primer
cgctccaagaaaggcactaac

SEQ ID NO: 107532 - DNA, 35 bp, Artificial Sequence
  primer
gtaaaacgacggccagttttcaaggaaggctgccc

SEQ ID NO: 107533 - DNA, 21 bp, Artificial Sequence
  primer
cgggttggaaagaagagaaac

SEQ ID NO: 107534 - DNA, 38 bp, Artificial Sequence
  primer
gtaaaacgacggccagtccaacattaaagccaaggtca

SEQ ID NO: 107535 - DNA, 38 bp, Artificial Sequence
  primer
gtaaaacgacggccagtactgaggtgggataatgtggg

SEQ ID NO: 107536 - DNA, 21 bp, Artificial Sequence
  primer
ccacaatctccacatccactg

SEQ ID NO: 107537 - DNA, 21 bp, Artificial Sequence
  primer
gaggacacgacgatgttgatg

SEQ ID NO: 107538 - DNA, 21 bp, Artificial Sequence
  primer
cgagtgcttgctgtactgctc

SEQ ID NO: 107539 - DNA, 37 bp, Artificial Sequence
  primer
gtaaaacgacggccagtctacaacctggcagacagcg

SEQ ID NO: 107540 - DNA, 21 bp, Artificial Sequence
  primer
cacacacctttcatttgggag

SEQ ID NO: 107541 - DNA, 40 bp, Artificial Sequence
  primer
gtaaaacgacggccagtagtgacataaatgcaacatgacg

SEQ ID NO: 107542 - DNA, 38 bp, Artificial Sequence
  primer
gtaaaacgacggccagtaacgaagaatgcatgaacagg

SEQ ID NO: 107543 - DNA, 26 bp, Artificial Sequence
  primer
tgattagtacatttgcctctgtgttg

SEQ ID NO: 107544 - DNA, 44 bp, Artificial Sequence
  primer
gtaaaacgacggccagtaaagagccactaaagttatggaaagag

SEQ ID NO: 107545 - DNA, 39 bp, Artificial Sequence
  primer
gtaaaacgacggccagttgaaatactgcattggctctcc

SEQ ID NO: 107546 - DNA, 21 bp, Artificial Sequence
  primer
aaatcatttcatgtcccaccg

SEQ ID NO: 107547 - DNA, 22 bp, Artificial Sequence
  primer
tgatcttcaaggactcctgagc

SEQ ID NO: 107548 - DNA, 38 bp, Artificial Sequence
  primer
gtaaaacgacggccagttgctaataaatgcacggcttc

SEQ ID NO: 107549 - DNA, 21 bp, Artificial Sequence
  primer
gaagactggaaaccatttgcc

SEQ ID NO: 107550 - DNA, 21 bp, Artificial Sequence
  primer
tttcaatgactgaggctgtgg

SEQ ID NO: 107551 - DNA, 38 bp, Artificial Sequence
  primer
gtaaaacgacggccagttctcctctgagtacgggttgg

SEQ ID NO: 107552 - DNA, 21 bp, Artificial Sequence
  primer
ctggacagctgctaagtcctg

SEQ ID NO: 107553 - DNA, 21 bp, Artificial Sequence
  primer
tttgcacatttgaggctgttc

SEQ ID NO: 107554 - DNA, 24 bp, Artificial Sequence
  primer
ccttcctatggaacaggctttaac

SEQ ID NO: 107555 - DNA, 38 bp, Artificial Sequence
  primer
gtaaaacgacggccagtgaggcagacagagacatgtgg

SEQ ID NO: 107556 - DNA, 21 bp, Artificial Sequence
  primer
aagaggcaagaatagcgcatc

SEQ ID NO: 107557 - DNA, 21 bp, Artificial Sequence
  primer
gcctaggagacctgtttccac

SEQ ID NO: 107558 - DNA, 21 bp, Artificial Sequence
  primer
cttctgaaggagactcccacg

SEQ ID NO: 107559 - DNA, 21 bp, Artificial Sequence
  primer
ggcagacagaagggtagaggg

SEQ ID NO: 107560 - DNA, 38 bp, Artificial Sequence
  primer
gtaaaacgacggccagtggagaaactgctcctgtttgg

SEQ ID NO: 107561 - DNA, 21 bp, Artificial Sequence
  primer
tgaatgaacacacacccttcc

SEQ ID NO: 107562 - DNA, 37 bp, Artificial Sequence
  primer
gtaaaacgacggccagtgtggctttccgtcctgtttc

SEQ ID NO: 107563 - DNA, 21 bp, Artificial Sequence
  primer
aaccacaaagcctccagctac

SEQ ID NO: 107564 - DNA, 21 bp, Artificial Sequence
  primer
gcagagtggtctcctctgtcc

SEQ ID NO: 107565 - DNA, 21 bp, Artificial Sequence
  primer
tgcaaaccgtgcacataattc

SEQ ID NO: 107566 - DNA, 21 bp, Artificial Sequence
  primer
atctgtgtagaggtgggaggg

SEQ ID NO: 107567 - DNA, 21 bp, Artificial Sequence
  primer
ctgcaccagagataggaaggc

SEQ ID NO: 107568 - DNA, 38 bp, Artificial Sequence
  primer
gtaaaacgacggccagtttattctctgcttcctgcacc

SEQ ID NO: 107569 - DNA, 38 bp, Artificial Sequence
  primer
gtaaaacgacggccagtagcaacccaacaagacaaagg

SEQ ID NO: 107570 - DNA, 22 bp, Artificial Sequence
  primer
cctcacgaaactgatcaagagg

SEQ ID NO: 107571 - DNA, 37 bp, Artificial Sequence
  primer
gtaaaacgacggccagtctagagtcggcttcaccagc

SEQ ID NO: 107572 - DNA, 37 bp, Artificial Sequence
  primer
gtaaaacgacggccagtccacgaagcaaccacaaatc

SEQ ID NO: 107573 - DNA, 22 bp, Artificial Sequence
  primer
tccaatgatattgacaagctgc

SEQ ID NO: 107574 - DNA, 22 bp, Artificial Sequence
  primer
agctcctatccacaaagacagc

SEQ ID NO: 107575 - DNA, 37 bp, Artificial Sequence
  primer
gtaaaacgacggccagtaaggcaaaggagggagtctg

SEQ ID NO: 107576 - DNA, 21 bp, Artificial Sequence
  primer
gggatggactcaagcagtctc

SEQ ID NO: 107577 - DNA, 38 bp, Artificial Sequence
  primer
gtaaaacgacggccagtaagccacagcatcaccctaag

SEQ ID NO: 107578 - DNA, 21 bp, Artificial Sequence
  primer
tcaacatcttggccaacaaac

SEQ ID NO: 107579 - DNA, 21 bp, Artificial Sequence
  primer
tcatgagacagtgctgcttcc

SEQ ID NO: 107580 - DNA, 38 bp, Artificial Sequence
  primer
gtaaaacgacggccagttgctgtaatgaatcagcgacc

SEQ ID NO: 107581 - DNA, 21 bp, Artificial Sequence
  primer
cctcaccactttcattcctgg

SEQ ID NO: 107582 - DNA, 44 bp, Artificial Sequence
  primer
gtaaaacgacggccagttggaactacatcctaaagaaattaccc

SEQ ID NO: 107583 - DNA, 20 bp, Artificial Sequence
  primer
cccggccttcagttctactt

SEQ ID NO: 107584 - DNA, 21 bp, Artificial Sequence
  primer
tgttgtttcttgctgtgaccc

SEQ ID NO: 107585 - DNA, 38 bp, Artificial Sequence
  primer
gtaaaacgacggccagtccactttcaaatgcaggacac

SEQ ID NO: 107586 - DNA, 20 bp, Artificial Sequence
  primer
caatgagccaagactgcacc

SEQ ID NO: 107587 - DNA, 21 bp, Artificial Sequence
  primer
atcatggttggatcagggttc

SEQ ID NO: 107588 - DNA, 21 bp, Artificial Sequence
  primer
tgccaaatacacacgcttacc

SEQ ID NO: 107589 - DNA, 21 bp, Artificial Sequence
  primer
ctggtgaatcgtaagtcctgc

SEQ ID NO: 107590 - DNA, 37 bp, Artificial Sequence
  primer
gtaaaacgacggccagtatcgtggaacaatcacctgc

SEQ ID NO: 107591 - DNA, 38 bp, Artificial Sequence
  primer
gtaaaacgacggccagtaaacaaattggtgtggctgtg

SEQ ID NO: 107592 - DNA, 21 bp, Artificial Sequence
  primer
gcatttggcctaaactctgtg

SEQ ID NO: 107593 - DNA, 40 bp, Artificial Sequence
  primer
gtaaaacgacggccagtcccttatgaatttaggcaagagc

SEQ ID NO: 107594 - DNA, 21 bp, Artificial Sequence
  primer
tgggaagagagagaatcaggg

SEQ ID NO: 107595 - DNA, 22 bp, Artificial Sequence
  primer
tccagaggctcagcttgtaatc

SEQ ID NO: 107596 - DNA, 19 bp, Artificial Sequence
  primer
ggtgattcgccaacctcag

SEQ ID NO: 107597 - DNA, 23 bp, Artificial Sequence
  primer
ggaaagctgacacattactaccg

SEQ ID NO: 107598 - DNA, 38 bp, Artificial Sequence
  primer
gtaaaacgacggccagtacccgcctctataccaagatg

SEQ ID NO: 107599 - DNA, 21 bp, Artificial Sequence
  primer
tggtagcatctgaacccacag

SEQ ID NO: 107600 - DNA, 22 bp, Artificial Sequence
  primer
cgtgtcgttcttgaggtactgg

SEQ ID NO: 107601 - DNA, 39 bp, Artificial Sequence
  primer
gtaaaacgacggccagttgcacaactgagttactgggtg

SEQ ID NO: 107602 - DNA, 21 bp, Artificial Sequence
  primer
acagtcatttgctggctttcc

SEQ ID NO: 107603 - DNA, 21 bp, Artificial Sequence
  primer
aggcaaagtggtggacaaatg

SEQ ID NO: 107604 - DNA, 21 bp, Artificial Sequence
  primer
ctcaatgctcatgctctcacc

SEQ ID NO: 107605 - DNA, 21 bp, Artificial Sequence
  primer
aacgcatgaatgagtgaatga

SEQ ID NO: 107606 - DNA, 38 bp, Artificial Sequence
  primer
gtaaaacgacggccagtgcaacagaagctgcacaaatc

SEQ ID NO: 107607 - DNA, 20 bp, Artificial Sequence
  primer
actctgtccaccttcgtccc

SEQ ID NO: 107608 - DNA, 37 bp, Artificial Sequence
  primer
gtaaaacgacggccagtgtggtcagggctcagaggtc

SEQ ID NO: 107609 - DNA, 38 bp, Artificial Sequence
  primer
gtaaaacgacggccagtttgatgatcggtcatactcgc

SEQ ID NO: 107610 - DNA, 38 bp, Artificial Sequence
  primer
gtaaaacgacggccagtcatgttctgatgggtgctgag

SEQ ID NO: 107611 - DNA, 38 bp, Artificial Sequence
  primer
gtaaaacgacggccagtactgattcacagtgaccaggg

SEQ ID NO: 107612 - DNA, 21 bp, Artificial Sequence
  primer
gggagggagaattgagtaggg

SEQ ID NO: 107613 - DNA, 38 bp, Artificial Sequence
  primer
gtaaaacgacggccagtccctcaacagcctcttctttc

SEQ ID NO: 107614 - DNA, 37 bp, Artificial Sequence
  primer
gtaaaacgacggccagtcttcccattcctggagtcag

SEQ ID NO: 107615 - DNA, 37 bp, Artificial Sequence
  primer
gtaaaacgacggccagtagaggccttcactctcccac

SEQ ID NO: 107616 - DNA, 20 bp, Artificial Sequence
  primer
attcatggccagagggattg

SEQ ID NO: 107617 - DNA, 21 bp, Artificial Sequence
  primer
ccaggaagtcctcaaagtccc

SEQ ID NO: 107618 - DNA, 21 bp, Artificial Sequence
  primer
aaagcggagtcaacctacagc

SEQ ID NO: 107619 - DNA, 20 bp, Artificial Sequence
  primer
tcctcagccctgacctcttc

SEQ ID NO: 107620 - DNA, 21 bp, Artificial Sequence
  primer
gtgagcctatatggaaggccc

SEQ ID NO: 107621 - DNA, 39 bp, Artificial Sequence
  primer
gtaaaacgacggccagtgggtagaacagagaaagccgag

SEQ ID NO: 107622 - DNA, 21 bp, Artificial Sequence
  primer
aatccagtccttcagaccctg

SEQ ID NO: 107623 - DNA, 38 bp, Artificial Sequence
  primer
gtaaaacgacggccagtatccagtcaagatgctctggc

SEQ ID NO: 107624 - DNA, 38 bp, Artificial Sequence
  primer
gtaaaacgacggccagtgggaagagtggtgtcaattcc

SEQ ID NO: 107625 - DNA, 26 bp, Artificial Sequence
  primer
catagcatgcctaatatttctaagcc

SEQ ID NO: 107626 - DNA, 21 bp, Artificial Sequence
  primer
taggactgcttaggagggagg

SEQ ID NO: 107627 - DNA, 21 bp, Artificial Sequence
  primer
atcatgcccattccatctagg

SEQ ID NO: 107628 - DNA, 35 bp, Artificial Sequence
  primer
gtaaaacgacggccagtcctttgccaacaacagcc

SEQ ID NO: 107629 - DNA, 40 bp, Artificial Sequence
  primer
gtaaaacgacggccagtaagggtctcttagaccagtgtgg

SEQ ID NO: 107630 - DNA, 20 bp, Artificial Sequence
  primer
ttaggaattggtgtggctgc

SEQ ID NO: 107631 - DNA, 35 bp, Artificial Sequence
  primer
gtaaaacgacggccagtccagtggccgattgaaag

SEQ ID NO: 107632 - DNA, 35 bp, Artificial Sequence
  primer
gtaaaacgacggccagtgagcgcgaaagtcaccac

SEQ ID NO: 107633 - DNA, 20 bp, Artificial Sequence
  primer
ctgctgagaacaggaggtgg

SEQ ID NO: 107634 - DNA, 37 bp, Artificial Sequence
  primer
gtaaaacgacggccagtttgcccaagtgattcctgag

SEQ ID NO: 107635 - DNA, 38 bp, Artificial Sequence
  primer
gtaaaacgacggccagtccctttcaaccacatacccac

SEQ ID NO: 107636 - DNA, 19 bp, Artificial Sequence
  primer
gtgctgccgcttactcctc

SEQ ID NO: 107637 - DNA, 38 bp, Artificial Sequence
  primer
gtaaaacgacggccagtatctctttcttgcccagctcc

SEQ ID NO: 107638 - DNA, 38 bp, Artificial Sequence
  primer
gtaaaacgacggccagtagcagtgtcagggtggtagtg

SEQ ID NO: 107639 - DNA, 20 bp, Artificial Sequence
  primer
cagtacccaggcctagcacc

SEQ ID NO: 107640 - DNA, 20 bp, Artificial Sequence
  primer
catttctgaacccagggagg

SEQ ID NO: 107641 - DNA, 38 bp, Artificial Sequence
  primer
gtaaaacgacggccagttaaggttggcacactccacag

SEQ ID NO: 107642 - DNA, 38 bp, Artificial Sequence
  primer
gtaaaacgacggccagtaagttgcaaccctggaaacag

SEQ ID NO: 107643 - DNA, 38 bp, Artificial Sequence
  primer
gtaaaacgacggccagtgattaaggccatacacaggcg

SEQ ID NO: 107644 - DNA, 38 bp, Artificial Sequence
  primer
gtaaaacgacggccagtgtgctactgatgtggcactgg

SEQ ID NO: 107645 - DNA, 21 bp, Artificial Sequence
  primer
cagtttctggaacctaagccc

SEQ ID NO: 107646 - DNA, 20 bp, Artificial Sequence
  primer
tgtttccacccattcctgag

SEQ ID NO: 107647 - DNA, 22 bp, Artificial Sequence
  primer
ggaccaagctacctaaaccagg

SEQ ID NO: 107648 - DNA, 38 bp, Artificial Sequence
  primer
gtaaaacgacggccagtcacctccatacctccaaccac

SEQ ID NO: 107649 - DNA, 21 bp, Artificial Sequence
  primer
atgagagcagaacaacgtggg

SEQ ID NO: 107650 - DNA, 38 bp, Artificial Sequence; identical to SEQ ID NO: 107642
  primer

SEQ ID NO: 107651 - DNA, 22 bp, Artificial Sequence
  primer
catcccaatgttaggtcaaagc

SEQ ID NO: 107652 - DNA, 38 bp, Artificial Sequence
  primer
gtaaaacgacggccagtgtcttgacctgacccgtcatc

SEQ ID NO: 107653 - DNA, 20 bp, Artificial Sequence
  primer
aaacccactccagagggaag

SEQ ID NO: 107654 - DNA, 21 bp, Artificial Sequence
  primer
gtctttctcctcccacacacc

SEQ ID NO: 107655 - DNA, 21 bp, Artificial Sequence
  primer
gatagtgcggaactcctcctc

SEQ ID NO: 107656 - DNA, 21 bp, Artificial Sequence
  primer
gatgggtggagttggagtcag

SEQ ID NO: 107657 - DNA, 21 bp, Artificial Sequence
  primer
gccttgtccatcttgtcacag

SEQ ID NO: 107658 - DNA, 21 bp, Artificial Sequence
  primer
tcagcattaagacctggaccc

SEQ ID NO: 107659 - DNA, 20 bp, Artificial Sequence
  primer
cagctctgagatgggaaggg

SEQ ID NO: 107660 - DNA, 36 bp, Artificial Sequence
  primer
gtaaaacgacggccagtatggtcaatgagccaaggg

SEQ ID NO: 107661 - DNA, 37 bp, Artificial Sequence
  primer
gtaaaacgacggccagtgtgggtaaggacagggttcc

SEQ ID NO: 107662 - DNA, 21 bp, Artificial Sequence
  primer
ctgaggtacccagtgcctttc

SEQ ID NO: 107663 - DNA, 21 bp, Artificial Sequence
  primer
cagaacttcagggtgggaatg

SEQ ID NO: 107664 - DNA, 39 bp, Artificial Sequence
  primer
gtaaaacgacggccagtaggatataccaaggcaatttgg

SEQ ID NO: 107665 - DNA, 21 bp, Artificial Sequence
  primer
ctttcagatggctcttccacc

SEQ ID NO: 107666 - DNA, 21 bp, Artificial Sequence
  primer
gtcgctggtgcagtacacatc

SEQ ID NO: 107667 - DNA, 21 bp, Artificial Sequence
  primer
gtgggtcttcctcctattccc

SEQ ID NO: 107668 - DNA, 27 bp, Artificial Sequence
  primer
gaattggttatttatactctgtggacg

SEQ ID NO: 107669 - DNA, 21 bp, Artificial Sequence
  primer
tgctcctctggtcctacaagc

SEQ ID NO: 107670 - DNA, 39 bp, Artificial Sequence
  primer
gtaaaacgacggccagtaaatctgggacagtttggtttg

SEQ ID NO: 107671 - DNA, 21 bp, Artificial Sequence
  primer
acagagagtaacagcggagcc

SEQ ID NO: 107672 - DNA, 38 bp, Artificial Sequence
  primer
gtaaaacgacggccagttctgcctagaagcagagcagg

SEQ ID NO: 107673 - DNA, 21 bp, Artificial Sequence
  primer
agagatgccgagaggaaacag

SEQ ID NO: 107674 - DNA, 21 bp, Artificial Sequence
  primer
catctaggaatgagcccttgg

SEQ ID NO: 107675 - DNA, 21 bp, Artificial Sequence
  primer
tatatctgtggcagacccagc

SEQ ID NO: 107676 - DNA, 38 bp, Artificial Sequence
  primer
gtaaaacgacggccagtgagaagggatgtcttccaagg

SEQ ID NO: 107677 - DNA, 38 bp, Artificial Sequence
  primer
gtaaaacgacggccagtggctatccgacagcatgagag

SEQ ID NO: 107678 - DNA, 38 bp, Artificial Sequence
  primer
gtaaaacgacggccagttctgacacacaggagtctggg

SEQ ID NO: 107679 - DNA, 21 bp, Artificial Sequence
  primer
ggaagccgtaactctgaggtg

SEQ ID NO: 107680 - DNA, 37 bp, Artificial Sequence
  primer
gtaaaacgacggccagtacatggctggtgatctttgc

SEQ ID NO: 107681 - DNA, 21 bp, Artificial Sequence
  primer
tgaagaagggagtctggaagc

SEQ ID NO: 107682 - DNA, 38 bp, Artificial Sequence
  primer
gtaaaacgacggccagttgaaccacctcttcactggtc

SEQ ID NO: 107683 - DNA, 21 bp, Artificial Sequence
  primer
tcacctcaagaacaaagcagc

SEQ ID NO: 107684 - DNA, 39 bp, Artificial Sequence
  primer
gtaaaacgacggccagttccatcaagaaagcaggatagg

SEQ ID NO: 107685 - DNA, 38 bp, Artificial Sequence
  primer
gtaaaacgacggccagtacccaaggtccttcgagaaac

SEQ ID NO: 107686 - DNA, 39 bp, Artificial Sequence
  primer
gtaaaacgacggccagtggacagagaaaggaatatcggg

SEQ ID NO: 107687 - DNA, 38 bp, Artificial Sequence
  primer
gtaaaacgacggccagttttgaagcacaaacaaatggg

SEQ ID NO: 107688 - DNA, 21 bp, Artificial Sequence
  primer
cattgtgctcataatccacgc

SEQ ID NO: 107689 - DNA, 21 bp, Artificial Sequence
  primer
tgcctgaattcttcactggtc

SEQ ID NO: 107690 - DNA, 21 bp, Artificial Sequence
  primer
caacaagaaccacactgaccc

SEQ ID NO: 107691 - DNA, 37 bp, Artificial Sequence
  primer
gtaaaacgacggccagtcctggctcagcctcctaaag

SEQ ID NO: 107692 - DNA, 39 bp, Artificial Sequence
  primer
gtaaaacgacggccagttgcaaaccagagtctatcatgc

SEQ ID NO: 107693 - DNA, 39 bp, Artificial Sequence
  primer
gtaaaacgacggccagtgaagtatgcctaagggcatgtg

SEQ ID NO: 107694 - DNA, 39 bp, Artificial Sequence
  primer
gtaaaacgacggccagtcggatcttcaatgattcgagtg

SEQ ID NO: 107695 - DNA, 21 bp, Artificial Sequence
  primer
gggtgctgttaggttattgcc

SEQ ID NO: 107696 - DNA, 21 bp, Artificial Sequence
  primer
tctgcctgaattcttcattgg

SEQ ID NO: 107697 - DNA, 21 bp, Artificial Sequence
  primer
ccaccatctaccacagcaatg

SEQ ID NO: 107698 - DNA, 39 bp, Artificial Sequence
  primer
gtaaaacgacggccagttgacaatactcacggtttgcag

SEQ ID NO: 107699 - DNA, 40 bp, Artificial Sequence
  primer
gtaaaacgacggccagtcaaagcaggatgtcatatccaag

SEQ ID NO: 107700 - DNA, 22 bp, Artificial Sequence
  primer
tcctttgtctgaaacccttgag

SEQ ID NO: 107701 - DNA, 22 bp, Artificial Sequence
  primer
tggatcctcaatgattcaactg

SEQ ID NO: 107702 - DNA, 19 bp, Artificial Sequence
  primer
acgagcagggtcagctctc

SEQ ID NO: 107703 - DNA, 19 bp, Artificial Sequence
  primer
tgagcacatggtacatgcc

SEQ ID NO: 107704 - DNA, 39 bp, Artificial Sequence
  primer
gtaaaacgacggccagtaagtcagggctttgacatttga

SEQ ID NO: 107705 - DNA, 21 bp, Artificial Sequence
  primer
atttccgaacgtggaaacatt

SEQ ID NO: 107706 - DNA, 26 bp, Artificial Sequence
  primer
gccttcaaacaaattattaaccagtc

SEQ ID NO: 107707 - DNA, 38 bp, Artificial Sequence
  primer
gtaaaacgacggccagtctggtctcggcacatttactc

SEQ ID NO: 107708 - DNA, 26 bp, Artificial Sequence
  primer
ccagtctcctaagctgtgtgtttatc

SEQ ID NO: 107709 - DNA, 38 bp, Artificial Sequence
  primer
gtaaaacgacggccagtttgtcccactgactttggttg

SEQ ID NO: 107710 - DNA, 35 bp, Artificial Sequence
  primer
gtaaaacgacggccagtgccttccaaagggctagg

SEQ ID NO: 107711 - DNA, 43 bp, Artificial Sequence
  primer
gtaaaacgacggccagtaaatttctgtacacgttcttacgtcc

SEQ ID NO: 107712 - DNA, 22 bp, Artificial Sequence
  primer
cgtgggactgtaagattcactg

SEQ ID NO: 107713 - DNA, 37 bp, Artificial Sequence
  primer
gtaaaacgacggccagtcaagcccagcacagtcagtc

SEQ ID NO: 107714 - DNA, 19 bp, Artificial Sequence
  primer
caggctcaagcaatcctcc

SEQ ID NO: 107715 - DNA, 26 bp, Artificial Sequence
  primer
gggcactgagtaatttagaatgtcac

SEQ ID NO: 107716 - DNA, 21 bp, Artificial Sequence
  primer
caagttgatatgcctgccttg

SEQ ID NO: 107717 - DNA, 21 bp, Artificial Sequence
  primer
acaggccagctgtttctgaag

SEQ ID NO: 107718 - DNA, 21 bp, Artificial Sequence
  primer
aaggttagccaagtgtggtgg

SEQ ID NO: 107719 - DNA, 21 bp, Artificial Sequence
  primer
tgggtgatttgataccagcac

SEQ ID NO: 107720 - DNA, 21 bp, Artificial Sequence
  primer
ccacagggtctctatgttgcc

SEQ ID NO: 107721 - DNA, 21 bp, Artificial Sequence
  primer
agaagggacagtgtgggtgac

SEQ ID NO: 107722 - DNA, 21 bp, Artificial Sequence
  primer
taagcaagacaagggaggagg

SEQ ID NO: 107723 - DNA, 21 bp, Artificial Sequence
  primer
tgtcttctagcccagtagccc

SEQ ID NO: 107724 - DNA, 38 bp, Artificial Sequence
  primer
gtaaaacgacggccagtgacagagtggtccacaagctg

SEQ ID NO: 107725 - DNA, 21 bp, Artificial Sequence
  primer
gtgatgccacaggtattgctc

SEQ ID NO: 107726 - DNA, 38 bp, Artificial Sequence
  primer
gtaaaacgacggccagttattgagattgggaggatggg

SEQ ID NO: 107727 - DNA, 35 bp, Artificial Sequence
  primer
gtaaaacgacggccagtcttccaaggcctgttggc

SEQ ID NO: 107728 - DNA, 38 bp, Artificial Sequence
  primer
gtaaaacgacggccagtgagctgcctgggcctataaac

SEQ ID NO: 107729 - DNA, 19 bp, Artificial Sequence
  primer
cagccaatgtgaggagcac

SEQ ID NO: 107730 - DNA, 20 bp, Artificial Sequence
  primer
cagaaggaaagtggcgaagg

SEQ ID NO: 107731 - DNA, 21 bp, Artificial Sequence
  primer
gaaccattcaagcgagaggag

SEQ ID NO: 107732 - DNA, 38 bp, Artificial Sequence
  primer
gtaaaacgacggccagttcaactctcaggaacactcgc

SEQ ID NO: 107733 - DNA, 21 bp, Artificial Sequence
  primer
gcgaccagtaaatctcacagc

SEQ ID NO: 107734 - DNA, 21 bp, Artificial Sequence
  primer
ataaatgcagtttccacacgg

SEQ ID NO: 107735 - DNA, 19 bp, Artificial Sequence
  primer
acgactctgccacccagtc

SEQ ID NO: 107736 - DNA, 21 bp, Artificial Sequence
  primer
agggcacctgcctgctactac

SEQ ID NO: 107737 - DNA, 38 bp, Artificial Sequence
  primer
gtaaaacgacggccagtacatgaagaggagggcagagt

SEQ ID NO: 107738 - DNA, 38 bp, Artificial Sequence
  primer
gtaaaacgacggccagtacaacaatcacgtgtgcagag

SEQ ID NO: 107739 - DNA, 38 bp, Artificial Sequence
  primer
gtaaaacgacggccagtgcagctgtgtttctggatgtg

SEQ ID NO: 107740 - DNA, 21 bp, Artificial Sequence
  primer
cacgcagacacaacacatacc

SEQ ID NO: 107741 - DNA, 20 bp, Artificial Sequence
  primer
accacgacggaaatcacttg

SEQ ID NO: 107742 - DNA, 21 bp, Artificial Sequence
  primer
cacgctttcaactagtggtgc

SEQ ID NO: 107743 - DNA, 38 bp, Artificial Sequence
  primer
gtaaaacgacggccagtctggccaggagagaataagcc

SEQ ID NO: 107744 - DNA, 21 bp, Artificial Sequence
  primer
cctccactccacaaacaggac

SEQ ID NO: 107745 - DNA, 38 bp, Artificial Sequence
  primer
gtaaaacgacggccagttatagcaagcaagcaaaggcg

SEQ ID NO: 107746 - DNA, 38 bp, Artificial Sequence
  primer
gtaaaacgacggccagtgggtagggaacatgggagttc

SEQ ID NO: 107747 - DNA, 21 bp, Artificial Sequence
  primer
accacccaagaaccaaagaag

SEQ ID NO: 107748 - DNA, 19 bp, Artificial Sequence
  primer
actggacgcagacagggag

SEQ ID NO: 107749 - DNA, 37 bp, Artificial Sequence
  primer
gtaaaacgacggccagtagaaggtttgccaatggctc

SEQ ID NO: 107750 - DNA, 38 bp, Artificial Sequence
  primer
gtaaaacgacggccagttctgtcagcctcttgcacttc

SEQ ID NO: 107751 - DNA, 38 bp, Artificial Sequence
  primer
gtaaaacgacggccagtgaggtcagtggtgtgtgcttc

SEQ ID NO: 107752 - DNA, 38 bp, Artificial Sequence
  primer
gtaaaacgacggccagttacagaagcgccaatcaagtc

SEQ ID NO: 107753 - DNA, 38 bp, Artificial Sequence
  primer
gtaaaacgacggccagttcttgacagtgcttgggtcac

SEQ ID NO: 107754 - DNA, 21 bp, Artificial Sequence
  primer
tgcaggtgccacagttaaatc

SEQ ID NO: 107755 - DNA, 39 bp, Artificial Sequence
  primer
gtaaaacgacggccagttcaatccctttacctgatgctg

SEQ ID NO: 107756 - DNA, 37 bp, Artificial Sequence
  primer
gtaaaacgacggccagtaatcaccataccctggagcc

SEQ ID NO: 107757 - DNA, 24 bp, Artificial Sequence
  primer
tcattacaattgatacatgggctt

SEQ ID NO: 107758 - DNA, 21 bp, Artificial Sequence
  primer
gtttacacattcagccggaac

SEQ ID NO: 107759 - DNA, 21 bp, Artificial Sequence
  primer
tttccaaatcctacaagcaaa

SEQ ID NO: 107760 - DNA, 27 bp, Artificial Sequence
  primer
cagtctccaattattcaatttaagtgc

SEQ ID NO: 107761 - DNA, 40 bp, Artificial Sequence
  primer
gtaaaacgacggccagtcaaggagaaaccagcattacttg

SEQ ID NO: 107762 - DNA, 40 bp, Artificial Sequence
  primer
gtaaaacgacggccagtgaatcaggttatgaaacccacaa

SEQ ID NO: 107763 - DNA, 39 bp, Artificial Sequence
  primer
gtaaaacgacggccagtttaagaactggtgctctgaggc

SEQ ID NO: 107764 - DNA, 21 bp, Artificial Sequence
  primer
gggaaggtaacggtgtcagag

SEQ ID NO: 107765 - DNA, 37 bp, Artificial Sequence
  primer
gtaaaacgacggccagtgagaatcctgcagccatttg

SEQ ID NO: 107766 - DNA, 38 bp, Artificial Sequence
  primer
gtaaaacgacggccagttgcaagtgtttatcccacagc

SEQ ID NO: 107767 - DNA, 38 bp, Artificial Sequence
  primer
gtaaaacgacggccagtacattcggacagtccatttcc

SEQ ID NO: 107768 - DNA, 21 bp, Artificial Sequence
  primer
tgagtggtggaactcaagctg

SEQ ID NO: 107769 - DNA, 37 bp, Artificial Sequence
  primer
gtaaaacgacggccagttggtcagcattctcaccctc

SEQ ID NO: 107770 - DNA, 26 bp, Artificial Sequence
  primer
aatgcatttatttagtatccaagctg

SEQ ID NO: 107771 - DNA, 23 bp, Artificial Sequence
  primer
gcatatttgctttcagacactgg

SEQ ID NO: 107772 - DNA, 24 bp, Artificial Sequence
  primer
tccaaagacaccattagatttcag

SEQ ID NO: 107773 - DNA, 38 bp, Artificial Sequence
  primer
gtaaaacgacggccagtgtgagggatggtttgatttgg

SEQ ID NO: 107774 - DNA, 26 bp, Artificial Sequence
  primer
tcctatttctcagttcttagctttgg

SEQ ID NO: 107775 - DNA, 21 bp, Artificial Sequence
  primer
aattgaatagtggtcccgcac

SEQ ID NO: 107776 - DNA, 19 bp, Artificial Sequence
  primer
gcttctcccaactccctcc

SEQ ID NO: 107777 - DNA, 21 bp, Artificial Sequence
  primer
tttccctgtttgcttctcaac

SEQ ID NO: 107778 - DNA, 38 bp, Artificial Sequence
  primer
gtaaaacgacggccagttcccaattaccctgatttgaa

SEQ ID NO: 107779 - DNA, 24 bp, Artificial Sequence
  primer
gctgtgtcatttaaccaaacagtg

SEQ ID NO: 107780 - DNA, 38 bp, Artificial Sequence
  primer
gtaaaacgacggccagtcctcagccttgtcatttcatc

SEQ ID NO: 107781 - DNA, 21 bp, Artificial Sequence
  primer
tttcaatttgatttgggaggc

SEQ ID NO: 107782 - DNA, 21 bp, Artificial Sequence
  primer
agagcaaggatttcttcacgg

SEQ ID NO: 107783 - DNA, 21 bp, Artificial Sequence
  primer
tagtgcttgtatgcagtgggc

SEQ ID NO: 107784 - DNA, 22 bp, Artificial Sequence
  primer
tgatagcagtgagatcgtcgag

SEQ ID NO: 107785 - DNA, 20 bp, Artificial Sequence
  primer
atgagcaactgcactcagcc

SEQ ID NO: 107786 - DNA, 21 bp, Artificial Sequence
  primer
tgcctgcttgttggaatacag

SEQ ID NO: 107787 - DNA, 21 bp, Artificial Sequence
  primer
atttagatcaaactgcaggcg

SEQ ID NO: 107788 - DNA, 38 bp, Artificial Sequence
  primer
gtaaaacgacggccagtagtgggttcagcagaggaatc

SEQ ID NO: 107789 - DNA, 20 bp, Artificial Sequence
  primer
caggcaagagctactgcacc

SEQ ID NO: 107790 - DNA, 22 bp, Artificial Sequence
  primer
tgggcaacagagtaagaccttg

SEQ ID NO: 107791 - DNA, 21 bp, Artificial Sequence
  primer
gggcatggctagaccatagtg

SEQ ID NO: 107792 - DNA, 24 bp, Artificial Sequence
  primer
acagtcagtcatcctctgaatcac

SEQ ID NO: 107793 - DNA, 35 bp, Artificial Sequence
  primer
gtaaaacgacggccagtattctggctgctggtggc

SEQ ID NO: 107794 - DNA, 40 bp, Artificial Sequence
  primer
gtaaaacgacggccagtcccttctccagttaattcatccc

SEQ ID NO: 107795 - DNA, 23 bp, Artificial Sequence
  primer
aacagatttgaagacaacaaccc

SEQ ID NO: 107796 - DNA, 24 bp, Artificial Sequence
  primer
ttgccacttaagataacctgattt

SEQ ID NO: 107797 - DNA, 21 bp, Artificial Sequence
  primer
catgaggatctcacctggttt

SEQ ID NO: 107798 - DNA, 36 bp, Artificial Sequence
  primer
gtaaaacgacggccagtcacaggtttgcggatgatg

SEQ ID NO: 107799 - DNA, 38 bp, Artificial Sequence
  primer
gtaaaacgacggccagtggagctttgcagagaatttcc

SEQ ID NO: 107800 - DNA, 21 bp, Artificial Sequence
  primer
gacagagcatgacaatcccag

SEQ ID NO: 107801 - DNA, 38 bp, Artificial Sequence
  primer
gtaaaacgacggccagtatgttcggtttagatgctccc

SEQ ID NO: 107802 - DNA, 21 bp, Artificial Sequence
  primer
ccactctaggcactgaacagc

SEQ ID NO: 107803 - DNA, 38 bp, Artificial Sequence
  primer
gtaaaacgacggccagtggtgtgttatagatgcgtggg

SEQ ID NO: 107804 - DNA, 22 bp, Artificial Sequence
  primer
gggttccattatttgttcatgg

SEQ ID NO: 107805 - DNA, 20 bp, Artificial Sequence
  primer
agaattcggaatcttggcag

SEQ ID NO: 107806 - DNA, 40 bp, Artificial Sequence
  primer
gtaaaacgacggccagtgggaagggtatatgtcaggtctc

SEQ ID NO: 107807 - DNA, 40 bp, Artificial Sequence
  primer
gtaaaacgacggccagtaagttgccaatagtttggtttcc

SEQ ID NO: 107808 - DNA, 21 bp, Artificial Sequence
  primer
ttacaagcatcaggagttggg

SEQ ID NO: 107809 - DNA, 38 bp, Artificial Sequence
  primer
gtaaaacgacggccagtaaggccatcgattgttagcac

SEQ ID NO: 107810 - DNA, 38 bp, Artificial Sequence
  primer
gtaaaacgacggccagtcattgcaacctagaatggcag

SEQ ID NO: 107811 - DNA, 21 bp, Artificial Sequence
  primer
gctcccaactacgaaggtcag

SEQ ID NO: 107812 - DNA, 21 bp, Artificial Sequence
  primer
gttgcccatcctattagcacc

SEQ ID NO: 107813 - DNA, 38 bp, Artificial Sequence
  primer
gtaaaacgacggccagtcttgcccttattgagccattc

SEQ ID NO: 107814 - DNA, 40 bp, Artificial Sequence
  primer
gtaaaacgacggccagttgcttgaatagacgttaccttgg

SEQ ID NO: 107815 - DNA, 38 bp, Artificial Sequence
  primer
gtaaaacgacggccagttctgaacatatggtggaaggg

SEQ ID NO: 107816 - DNA, 21 bp, Artificial Sequence
  primer
tggaggcagtatgcaagtctg

SEQ ID NO: 107817 - DNA, 21 bp, Artificial Sequence
  primer
acttgtcttgtgtcctggtgc

SEQ ID NO: 107818 - DNA, 41 bp, Artificial Sequence
  primer
gtaaaacgacggccagtcgcaattcttatccatttatgtcc

SEQ ID NO: 107819 - DNA, 38 bp, Artificial Sequence
  primer
gtaaaacgacggccagtttaggtatgtggccttggaaa

SEQ ID NO: 107820 - DNA, 21 bp, Artificial Sequence
  primer
ctgagccattaagcatttccc

SEQ ID NO: 107821 - DNA, 21 bp, Artificial Sequence
  primer
ttcatttgatagggtggaggg

SEQ ID NO: 107822 - DNA, 21 bp, Artificial Sequence
  primer
atcaccagtactgcccaaagc

SEQ ID NO: 107823 - DNA, 23 bp, Artificial Sequence
  primer
tgggtttgcagtaagacaaattc

SEQ ID NO: 107824 - DNA, 40 bp, Artificial Sequence
  primer
gtaaaacgacggccagttctgactatgatttatgggtcgg

SEQ ID NO: 107825 - DNA, 19 bp, Artificial Sequence
  primer
gccattggcagtagatggg

SEQ ID NO: 107826 - DNA, 19 bp, Artificial Sequence
  primer
gatcacctgagcctgggag

SEQ ID NO: 107827 - DNA, 25 bp, Artificial Sequence
  primer
aaatttctagatatcagccacaacc

SEQ ID NO: 107828 - DNA, 42 bp, Artificial Sequence
  primer
gtaaaacgacggccagtctcattgtagaatcaaagccttctc

SEQ ID NO: 107829 - DNA, 43 bp, Artificial Sequence
  primer
gtaaaacgacggccagttgtgcaaatatttagaactaagcctg

SEQ ID NO: 107830 - DNA, 42 bp, Artificial Sequence
  primer
gtaaaacgacggccagtttcttactttgagcgacaatgaatc

SEQ ID NO: 107831 - DNA, 36 bp, Artificial Sequence
  primer
gtaaaacgacggccagtgtttagccaaccctgcctg

SEQ ID NO: 107832 - DNA, 24 bp, Artificial Sequence
  primer
cctgaaatacttgattacttgccg

SEQ ID NO: 107833 - DNA, 23 bp, Artificial Sequence
  primer
ttagtgctgtatgaatcgcagtg

SEQ ID NO: 107834 - DNA, 38 bp, Artificial Sequence
  primer
gtaaaacgacggccagttgagaatcagtgccctccatc

SEQ ID NO: 107835 - DNA, 21 bp, Artificial Sequence
  primer
aagcaatcataatcaggtggg

SEQ ID NO: 107836 - DNA, 26 bp, Artificial Sequence
  primer
gcaggacttcctgtaacgatataaac

SEQ ID NO: 107837 - DNA, 35 bp, Artificial Sequence
  primer
gtaaaacgacggccagtgtcttccctgcctcccac

SEQ ID NO: 107838 - DNA, 26 bp, Artificial Sequence
  primer
ttatttcatcatggcttcattacttc

SEQ ID NO: 107839 - DNA, 20 bp, Artificial Sequence
  primer
atttgctaaattgggctggg

SEQ ID NO: 107840 - DNA, 39 bp, Artificial Sequence
  primer
gtaaaacgacggccagttgtttggactggtgctctgtag

SEQ ID NO: 107841 - DNA, 20 bp, Artificial Sequence
  primer
ggatgacacagcgagattcc

SEQ ID NO: 107842 - DNA, 19 bp, Artificial Sequence
  primer
tgggtgacaagagcgagat

SEQ ID NO: 107843 - DNA, 38 bp, Artificial Sequence
  primer
gtaaaacgacggccagtggtcatgtatcaggatggcag

SEQ ID NO: 107844 - DNA, 21 bp, Artificial Sequence
  primer
cagtggtggttggaattaccc

SEQ ID NO: 107845 - DNA, 22 bp, Artificial Sequence
  primer
ttcgtgttgtttgtacacagcc

SEQ ID NO: 107846 - DNA, 21 bp, Artificial Sequence
  primer
cttaggctgtcaccttccctg

SEQ ID NO: 107847 - DNA, 38 bp, Artificial Sequence
  primer
gtaaaacgacggccagtataggacagaaagcacctggc

SEQ ID NO: 107848 - DNA, 21 bp, Artificial Sequence
  primer
ccagagctgctaaatggactg

SEQ ID NO: 107849 - DNA, 21 bp, Artificial Sequence
  primer
ctgcattacatgtgctgaggg

SEQ ID NO: 107850 - DNA, 37 bp, Artificial Sequence
  primer
gtaaaacgacggccagtacagctgcagggagtccaac

SEQ ID NO: 107851 - DNA, 38 bp, Artificial Sequence
  primer
gtaaaacgacggccagtccatgaaacacccaggaactc

SEQ ID NO: 107852 - DNA, 21 bp, Artificial Sequence
  primer
cgcaactatgagggaagacac

SEQ ID NO: 107853 - DNA, 38 bp, Artificial Sequence
  primer
gtaaaacgacggccagttcagcaaatcctagtcagccc

SEQ ID NO: 107854 - DNA, 38 bp, Artificial Sequence
  primer
gtaaaacgacggccagtagtgagaggatgactctgccc

SEQ ID NO: 107855 - DNA, 21 bp, Artificial Sequence
  primer
aaagagagcatcaggtttgcc

SEQ ID NO: 107856 - DNA, 21 bp, Artificial Sequence
  primer
acaggtagggaacacctccag

SEQ ID NO: 107857 - DNA, 38 bp, Artificial Sequence
  primer
gtaaaacgacggccagtcacttctgcaggatgaaggac

SEQ ID NO: 107858 - DNA, 38 bp, Artificial Sequence
  primer
gtaaaacgacggccagtcgctatccaccatcatgtacc

SEQ ID NO: 107859 - DNA, 21 bp, Artificial Sequence
  primer
ggttccgcacatctttgaatc

SEQ ID NO: 107860 - DNA, 35 bp, Artificial Sequence
  primer
gtaaaacgacggccagtacccaaagccctcacctg

SEQ ID NO: 107861 - DNA, 26 bp, Artificial Sequence
  primer
gctccctttatgtcttcctttacatc

SEQ ID NO: 107862 - DNA, 38 bp, Artificial Sequence
  primer
gtaaaacgacggccagtcaatccatctgtcttggcctc

SEQ ID NO: 107863 - DNA, 21 bp, Artificial Sequence
  primer
ctgggtgagagagagcaagac

SEQ ID NO: 107864 - DNA, 21 bp, Artificial Sequence
  primer
ttggctgtttaaccttctggg

SEQ ID NO: 107865 - DNA, 38 bp, Artificial Sequence
  primer
gtaaaacgacggccagtgttggctagggacagcagaag

SEQ ID NO: 107866 - DNA, 21 bp, Artificial Sequence
  primer
agcaatgtggcatcaactagc

SEQ ID NO: 107867 - DNA, 21 bp, Artificial Sequence
  primer
gacaaataatggccacagcac

SEQ ID NO: 107868 - DNA, 19 bp, Artificial Sequence
  primer
aatcattccagtggtgccc

SEQ ID NO: 107869 - DNA, 21 bp, Artificial Sequence
  primer
ctgacgacctaactggttccc

SEQ ID NO: 107870 - DNA, 21 bp, Artificial Sequence
  primer
ctggagcaacagtgtgggtag

SEQ ID NO: 107871 - DNA, 38 bp, Artificial Sequence
  primer
gtaaaacgacggccagtggcttcgaatcattaagggtg

SEQ ID NO: 107872 - DNA, 19 bp, Artificial Sequence
  primer
aatcattccagtggtgccc

SEQ ID NO: 107873 - DNA, 18 bp, Artificial Sequence
  primer
tccagccctcctgcctac

SEQ ID NO: 107874 - DNA, 41 bp, Artificial Sequence
  primer
gtaaaacgacggccagtcaatttgataccttctaaccgtgc

SEQ ID NO: 107875 - DNA, 22 bp, Artificial Sequence
  primer
caaatagaattcacggcagtcc

SEQ ID NO: 107876 - DNA, 35 bp, Artificial Sequence
  primer
gtaaaacgacggccagttccagccctcctgcctac

SEQ ID NO: 107877 - DNA, 20 bp, Artificial Sequence
  primer
cccgtcagtgttaatgccag

SEQ ID NO: 107878 - DNA, 21 bp, Artificial Sequence
  primer
agagaagattccaggagcagc

SEQ ID NO: 107879 - DNA, 37 bp, Artificial Sequence
  primer
gtaaaacgacggccagtgtgcggtgcctacatctgtc

SEQ ID NO: 107880 - DNA, 21 bp, Artificial Sequence
  primer
aactggagagcaagtggaagg

SEQ ID NO: 107881 - DNA, 20 bp, Artificial Sequence
  primer
aaatgcctcagcgtagggag

SEQ ID NO: 107882 - DNA, 39 bp, Artificial Sequence
  primer
gtaaaacgacggccagtggttccaacgttaacaccaaag

SEQ ID NO: 107883 - DNA, 21 bp, Artificial Sequence
  primer
gacacgtctagcctcaccctc

SEQ ID NO: 107884 - DNA, 38 bp, Artificial Sequence
  primer
gtaaaacgacggccagttatcaaagcatgtgctcctcc

SEQ ID NO: 107885 - DNA, 41 bp, Artificial Sequence; identical to SEQ ID NO: 107874
  primer

SEQ ID NO: 107886 - DNA, 38 bp, Artificial Sequence
  primer
gtaaaacgacggccagttgcccaaatctgcttacaagg

SEQ ID NO: 107887 - DNA, 38 bp, Artificial Sequence
  primer
gtaaaacgacggccagtctctgccttccctgttgagac

SEQ ID NO: 107888 - DNA, 35 bp, Artificial Sequence
  primer
gtaaaacgacggccagtctggtcctcacccggact

SEQ ID NO: 107889 - DNA, 19 bp, Artificial Sequence
  primer
ctgtactgcccagtgctgc

SEQ ID NO: 107890 - DNA, 27 bp, Artificial Sequence
  primer
acagatgacagtgaaagatttaacaag

SEQ ID NO: 107891 - DNA, 38 bp, Artificial Sequence
  primer
gtaaaacgacggccagtttgctgaaagacaatttgcca

SEQ ID NO: 107892 - DNA, 38 bp, Artificial Sequence
  primer
gtaaaacgacggccagtaatccgaaggagtgacgagac

SEQ ID NO: 107893 - DNA, 38 bp, Artificial Sequence
  primer
gtaaaacgacggccagttaaggcacacggatcaaacag

SEQ ID NO: 107894 - DNA, 23 bp, Artificial Sequence
  primer
gaagctccttggagaattaggag

SEQ ID NO: 107895 - DNA, 21 bp, Artificial Sequence
  primer
ggcaagtaatgccgttgactc

SEQ ID NO: 107896 - DNA, 42 bp, Artificial Sequence
  primer
gtaaaacgacggccagtgatttggaagtagagacgcataaca

SEQ ID NO: 107897 - DNA, 39 bp, Artificial Sequence
  primer
gtaaaacgacggccagtgcctgcgttacacggaatatag

SEQ ID NO: 107898 - DNA, 20 bp, Artificial Sequence
  primer
caacggcaaggacgattatg

SEQ ID NO: 107899 - DNA, 21 bp, Artificial Sequence
  primer
tgtacgccaacgtttatgatg

SEQ ID NO: 107900 - DNA, 35 bp, Artificial Sequence
  primer
gtaaaacgacggccagttgacctcgtgatctgccc

SEQ ID NO: 107901 - DNA, 39 bp, Artificial Sequence
  primer
gtaaaacgacggccagtggaatctcccgcttcttagttc

SEQ ID NO: 107902 - DNA, 37 bp, Artificial Sequence
  primer
gtaaaacgacggccagtctcttccctgagtgttgccc

SEQ ID NO: 107903 - DNA, 21 bp, Artificial Sequence
  primer
tgccactatttcaccagaagc

SEQ ID NO: 107904 - DNA, 36 bp, Artificial Sequence
  primer
gtaaaacgacggccagtcatgcctggctcaacaatg

SEQ ID NO: 107905 - DNA, 21 bp, Artificial Sequence
  primer
cggtctcccttggtttgtaac

SEQ ID NO: 107906 - DNA, 21 bp, Artificial Sequence
  primer
caaaggcctacctcacactcc

SEQ ID NO: 107907 - DNA, 21 bp, Artificial Sequence
  primer
tggcaatcactcctttgtcac

SEQ ID NO: 107908 - DNA, 21 bp, Artificial Sequence
  primer
ccctcctccttcatgctacag

SEQ ID NO: 107909 - DNA, 38 bp, Artificial Sequence
  primer
gtaaaacgacggccagtgctgatgggagtcttggtctc

SEQ ID NO: 107910 - DNA, 41 bp, Artificial Sequence
  primer
gtaaaacgacggccagttgggaaagttcttccataacattg

SEQ ID NO: 107911 - DNA, 19 bp, Artificial Sequence
  primer
gcaacagagcaagaccctg

SEQ ID NO: 107912 - DNA, 21 bp, Artificial Sequence
  primer
ctccctggctcctaaataccc

SEQ ID NO: 107913 - DNA, 23 bp, Artificial Sequence
  primer
aagctagccaaatcagtgtcctt

SEQ ID NO: 107914 - DNA, 38 bp, Artificial Sequence
  primer
gtaaaacgacggccagtaaggctagtcactggctctgc

SEQ ID NO: 107915 - DNA, 23 bp, Artificial Sequence
  primer
ctgtttcagtcagaaagggagac

SEQ ID NO: 107916 - DNA, 26 bp, Artificial Sequence
  primer
tgtaaagagcaatgacttatcaatcg

SEQ ID NO: 107917 - DNA, 25 bp, Artificial Sequence
  primer
aaatcaagggtgactagaggatgat

SEQ ID NO: 107918 - DNA, 21 bp, Artificial Sequence
  primer
acatttctttcgttggcatgg

SEQ ID NO: 107919 - DNA, 22 bp, Artificial Sequence
  primer
aatcacgggacattctacaagc

SEQ ID NO: 107920 - DNA, 41 bp, Artificial Sequence
  primer
gtaaaacgacggccagtcccaaactttatcatcagatttcc

SEQ ID NO: 107921 - DNA, 36 bp, Artificial Sequence
  primer
gtaaaacgacggccagttgccagcattcttgcgtag

SEQ ID NO: 107922 - DNA, 24 bp, Artificial Sequence
  primer
tttaaccagatgaattgtttcctg

SEQ ID NO: 107923 - DNA, 38 bp, Artificial Sequence
  primer
gtaaaacgacggccagtaccaaacgtaatcaggcatcc

SEQ ID NO: 107924 - DNA, 43 bp, Artificial Sequence
  primer
gtaaaacgacggccagtaaagggcagactgactataatttctg

SEQ ID NO: 107925 - DNA, 37 bp, Artificial Sequence
  primer
gtaaaacgacggccagtgggaaaggttgatggaggag

SEQ ID NO: 107926 - DNA, 24 bp, Artificial Sequence
  primer
aagtgctttccagagcacaataac

SEQ ID NO: 107927 - DNA, 27 bp, Artificial Sequence
  primer
ttgactgtaaggttaataaatgccaac

SEQ ID NO: 107928 - DNA, 43 bp, Artificial Sequence
  primer
gtaaaacgacggccagtgctatctgaggatcaggttatttctg

SEQ ID NO: 107929 - DNA, 22 bp, Artificial Sequence
  primer
accaaattatggaggcacagtc

SEQ ID NO: 107930 - DNA, 18 bp, Artificial Sequence
  primer
gagcggctgaaggagcag

SEQ ID NO: 107931 - DNA, 38 bp, Artificial Sequence
  primer
gtaaaacgacggccagtacttccggtcaaagtgcaata

SEQ ID NO: 107932 - DNA, 39 bp, Artificial Sequence
  primer
gtaaaacgacggccagtttaaatgatatgcccaccttgg

SEQ ID NO: 107933 - DNA, 22 bp, Artificial Sequence
  primer
ccaatgtgctcaacattcaaac

SEQ ID NO: 107934 - DNA, 21 bp, Artificial Sequence
  primer
tgtgaggtagtgtgctgatgg

SEQ ID NO: 107935 - DNA, 39 bp, Artificial Sequence
  primer
gtaaaacgacggccagtaatcaagcttggaaatcccatt

SEQ ID NO: 107936 - DNA, 40 bp, Artificial Sequence
  primer
gtaaaacgacggccagttccctgatataaatacgcacacc

SEQ ID NO: 107937 - DNA, 38 bp, Artificial Sequence
  primer
gtaaaacgacggccagtcagcaatgggtcatgcttaat

SEQ ID NO: 107938 - DNA, 40 bp, Artificial Sequence
  primer
gtaaaacgacggccagttccaatcacgttgtcagtacaca

SEQ ID NO: 107939 - DNA, 23 bp, Artificial Sequence
  primer
cagaataagaggcaatgtgaagg

SEQ ID NO: 107940 - DNA, 20 bp, Artificial Sequence
  primer
ggaaattgctgtatgccagg

SEQ ID NO: 107941 - DNA, 41 bp, Artificial Sequence
  primer
gtaaaacgacggccagtccaggtcaacataaatcacacatc

SEQ ID NO: 107942 - DNA, 24 bp, Artificial Sequence
  primer
gatgttcatacagttccatgatcc

SEQ ID NO: 107943 - DNA, 21 bp, Artificial Sequence
  primer
gcctaagtatcatgcagcacc

SEQ ID NO: 107944 - DNA, 21 bp, Artificial Sequence
  primer
cacattggttccgagagtgtg

SEQ ID NO: 107945 - DNA, 39 bp, Artificial Sequence
  primer
gtaaaacgacggccagttctcaaagggagtaaaggcttg

SEQ ID NO: 107946 - DNA, 24 bp, Artificial Sequence
  primer
ggtttccctttaattcaaatcagc

SEQ ID NO: 107947 - DNA, 38 bp, Artificial Sequence
  primer
gtaaaacgacggccagtcaaccacagcactgaacacag

SEQ ID NO: 107948 - DNA, 38 bp, Artificial Sequence
  primer
gtaaaacgacggccagtctttaccatcttagcctgcgg

SEQ ID NO: 107949 - DNA, 21 bp, Artificial Sequence
  primer
gttagcttgagcgctattccc

SEQ ID NO: 107950 - DNA, 20 bp, Artificial Sequence
  primer
ggcaagattgcagctttcag

SEQ ID NO: 107951 - DNA, 37 bp, Artificial Sequence
  primer
gtaaaacgacggccagtactcatgacaaggcactggg

SEQ ID NO: 107952 - DNA, 20 bp, Artificial Sequence
  primer
gtggtacagaaggtctgccg

SEQ ID NO: 107953 - DNA, 21 bp, Artificial Sequence
  primer
gcagatggaagcctactgtcc

SEQ ID NO: 107954 - DNA, 21 bp, Artificial Sequence
  primer
cccttgagcagcttgaacatt

SEQ ID NO: 107955 - DNA, 41 bp, Artificial Sequence
  primer
gtaaaacgacggccagtttctaatgcaaactggctctactg

SEQ ID NO: 107956 - DNA, 38 bp, Artificial Sequence
  primer
gtaaaacgacggccagtcacagcaaaggagggagtgag

SEQ ID NO: 107957 - DNA, 38 bp, Artificial Sequence
  primer
gtaaaacgacggccagtaagaacgtctcttgcctctgc

SEQ ID NO: 107958 - DNA, 21 bp, Artificial Sequence
  primer
tcaagcacatttccaaagacc

SEQ ID NO: 107959 - DNA, 27 bp, Artificial Sequence
  primer
agctagtgaattaaagtgaaacactcc

SEQ ID NO: 107960 - DNA, 37 bp, Artificial Sequence
  primer
gtaaaacgacggccagtgctggcgttaaacgaatgag

SEQ ID NO: 107961 - DNA, 20 bp, Artificial Sequence
  primer
tgcttcaggcctctaacagc

SEQ ID NO: 107962 - DNA, 39 bp, Artificial Sequence
  primer
gtaaaacgacggccagtagcaacacctggaataaagagc

SEQ ID NO: 107963 - DNA, 37 bp, Artificial Sequence
  primer
gtaaaacgacggccagtaaatggcacaggtgtgcttc

SEQ ID NO: 107964 - DNA, 20 bp, Artificial Sequence
  primer
cctgacctcgtgatctgctc

SEQ ID NO: 107965 - DNA, 38 bp, Artificial Sequence
  primer
gtaaaacgacggccagtagagccaggtttgctgttagc

SEQ ID NO: 107966 - DNA, 38 bp, Artificial Sequence
  primer
gtaaaacgacggccagtcctccacctcattgattatgc

SEQ ID NO: 107967 - DNA, 23 bp, Artificial Sequence
  primer
cccatggtttatgtgagaatacg

SEQ ID NO: 107968 - DNA, 21 bp, Artificial Sequence
  primer
agctgggttaaacagtgaggg

SEQ ID NO: 107969 - DNA, 41 bp, Artificial Sequence
  primer
gtaaaacgacggccagttgaagcaatctccctattgctaag

SEQ ID NO: 107970 - DNA, 42 bp, Artificial Sequence
  primer
gtaaaacgacggccagtacaaaggaaagtctagaaccaaatg

SEQ ID NO: 107971 - DNA, 22 bp, Artificial Sequence
  primer
gcacattacctgtctgatgtgg

SEQ ID NO: 107972 - DNA, 21 bp, Artificial Sequence
  primer
ttgggaagataaatgcaaagg

SEQ ID NO: 107973 - DNA, 39 bp, Artificial Sequence
  primer
gtaaaacgacggccagttttaggatggctaaagtgctgc

SEQ ID NO: 107974 - DNA, 38 bp, Artificial Sequence
  primer
gtaaaacgacggccagtgaaatgcagccacatgctatc

SEQ ID NO: 107975 - DNA, 21 bp, Artificial Sequence
  primer
gaaatgcttgccaatatgcac

SEQ ID NO: 107976 - DNA, 42 bp, Artificial Sequence
  primer
gtaaaacgacggccagtaacttgatataccagctaagcaacc

SEQ ID NO: 107977 - DNA, 39 bp, Artificial Sequence
  primer
gtaaaacgacggccagtggtaacattcctcacgtatccc

SEQ ID NO: 107978 - DNA, 22 bp, Artificial Sequence
  primer
aagaggaaatcgattgaaaggg

SEQ ID NO: 107979 - DNA, 27 bp, Artificial Sequence
  primer
tcctctttagtacaaatcatagcaagc

SEQ ID NO: 107980 - DNA, 38 bp, Artificial Sequence
  primer
gtaaaacgacggccagtctgagcaatacagcgagaccc

SEQ ID NO: 107981 - DNA, 18 bp, Artificial Sequence
  primer
gcggtgagccaagatagc

SEQ ID NO: 107982 - DNA, 21 bp, Artificial Sequence
  primer
agcctgagccatgattgtacc

SEQ ID NO: 107983 - DNA, 26 bp, Artificial Sequence
  primer
aaatcaggaaacatatttagctggac

SEQ ID NO: 107984 - DNA, 42 bp, Artificial Sequence
  primer
gtaaaacgacggccagtgctttatgtttgcaagatttgtgtc

SEQ ID NO: 107985 - DNA, 21 bp, Artificial Sequence
  primer
cactgcttcatttggtcatcg

SEQ ID NO: 107986 - DNA, 36 bp, Artificial Sequence
  primer
gtaaaacgacggccagtcacacttcgcagctgaacc

SEQ ID NO: 107987 - DNA, 38 bp, Artificial Sequence
  primer
gtaaaacgacggccagtcatacctgggagaggtcttgg

SEQ ID NO: 107988 - DNA, 23 bp, Artificial Sequence
  primer
tccaactaatgacgatcatttca

SEQ ID NO: 107989 - DNA, 41 bp, Artificial Sequence
  primer
gtaaaacgacggccagttcaaattactttcaaatgcttcca

SEQ ID NO: 107990 - DNA, 41 bp, Artificial Sequence
  primer
gtaaaacgacggccagttttgattgtgctattccataattg

SEQ ID NO: 107991 - DNA, 21 bp, Artificial Sequence
  primer
tagcatctgcctgtccagaag

SEQ ID NO: 107992 - DNA, 23 bp, Artificial Sequence
  primer
cctcctacaaagttgtgctatgg

SEQ ID NO: 107993 - DNA, 39 bp, Artificial Sequence
  primer
gtaaaacgacggccagtctcttagcagtgcctctgtgtt

SEQ ID NO: 107994 - DNA, 22 bp, Artificial Sequence
  primer
cccactaaccaacctcttctgc

SEQ ID NO: 107995 - DNA, 43 bp, Artificial Sequence
  primer
gtaaaacgacggccagtaaacgaatatagttgttctccactga

SEQ ID NO: 107996 - DNA, 27 bp, Artificial Sequence
  primer
ttctctgcttctatgggtaatagaata

SEQ ID NO: 107997 - DNA, 44 bp, Artificial Sequence
  primer
gtaaaacgacggccagtcactgcaaatcttcgtaacattagttc

SEQ ID NO: 107998 - DNA, 22 bp, Artificial Sequence
  primer
cggcctaactgacgctatattc

SEQ ID NO: 107999 - DNA, 24 bp, Artificial Sequence
  primer
cacggaaatggacttcataacatc

SEQ ID NO: 108000 - DNA, 21 bp, Artificial Sequence
  primer
tttgtttaagcaattctgcgg

SEQ ID NO: 108001 - DNA, 18 bp, Artificial Sequence
  primer
aggcgtgatccactgtgc

SEQ ID NO: 108002 - DNA, 27 bp, Artificial Sequence
  primer
tgaaatgcaatacagtataatgtcaga

SEQ ID NO: 108003 - DNA, 19 bp, Artificial Sequence
  primer
tgtgggccactgcacttag

SEQ ID NO: 108004 - DNA, 21 bp, Artificial Sequence
  primer
gggaatgccatcatgctaact

SEQ ID NO: 108005 - DNA, 37 bp, Artificial Sequence
  primer
gtaaaacgacggccagtcagcacagatttgtccaggg

SEQ ID NO: 108006 - DNA, 38 bp, Artificial Sequence
  primer
gtaaaacgacggccagtacagtgtcctgtgagtccctg

SEQ ID NO: 108007 - DNA, 20 bp, Artificial Sequence
  primer
ctgcagataggtgcaaaggc

SEQ ID NO: 108008 - DNA, 21 bp, Artificial Sequence
  primer
tcccgcacatacaaagcatag

SEQ ID NO: 108009 - DNA, 38 bp, Artificial Sequence
  primer
gtaaaacgacggccagtatagaagtcccagctctgccc

SEQ ID NO: 108010 - DNA, 21 bp, Artificial Sequence
  primer
agtgtcctcatcctcaggcag

SEQ ID NO: 108011 - DNA, 20 bp, Artificial Sequence
  primer
ctgatcctctcacagctggc

SEQ ID NO: 108012 - DNA, 21 bp, Artificial Sequence
  primer
ctaaggtggcatcacttccag

SEQ ID NO: 108013 - DNA, 38 bp, Artificial Sequence
  primer
gtaaaacgacggccagtgcagagaaatgtgtagccagc

SEQ ID NO: 108014 - DNA, 21 bp, Artificial Sequence
  primer
tcaaaccaagagctcaaaggc

SEQ ID NO: 108015 - DNA, 21 bp, Artificial Sequence
  primer
agagtcacctgctgttcccag

SEQ ID NO: 108016 - DNA, 38 bp, Artificial Sequence
  primer
gtaaaacgacggccagttcctccttcacttccacactg

SEQ ID NO: 108017 - DNA, 21 bp, Artificial Sequence
  primer
cctcactagccacaagcagag

SEQ ID NO: 108018 - DNA, 21 bp, Artificial Sequence
  primer
gcacaagcacagggataaagg

SEQ ID NO: 108019 - DNA, 38 bp, Artificial Sequence
  primer
gtaaaacgacggccagttcctctggcttaagatctgcc

SEQ ID NO: 108020 - DNA, 40 bp, Artificial Sequence
  primer
gtaaaacgacggccagttccatctcacagcttctatggac

SEQ ID NO: 108021 - DNA, 21 bp, Artificial Sequence
  primer
gcactgggattacaaatgcag

SEQ ID NO: 108022 - DNA, 20 bp, Artificial Sequence
  primer
atggacagaagcctgtggtg

SEQ ID NO: 108023 - DNA, 21 bp, Artificial Sequence
  primer
aggagcatgaagacacaaccc

SEQ ID NO: 108024 - DNA, 37 bp, Artificial Sequence
  primer
gtaaaacgacggccagtatggaagggtgggtcatttg

SEQ ID NO: 108025 - DNA, 21 bp, Artificial Sequence
  primer
ctgcctctatcccagacttcc

SEQ ID NO: 108026 - DNA, 21 bp, Artificial Sequence
  primer
gcttcctcttccttctcgctc

SEQ ID NO: 108027 - DNA, 20 bp, Artificial Sequence
  primer
acatcaagcctcccaacatc

SEQ ID NO: 108028 - DNA, 21 bp, Artificial Sequence
  primer
agggaagaagcagagggagtc

SEQ ID NO: 108029 - DNA, 38 bp, Artificial Sequence
  primer
gtaaaacgacggccagtcatctcgaatcttgaggaccc

SEQ ID NO: 108030 - DNA, 21 bp, Artificial Sequence
  primer
ccaccttgtcctgtagactgc

SEQ ID NO: 108031 - DNA, 21 bp, Artificial Sequence
  primer
tctagcagtcgccaaacacac

SEQ ID NO: 108032 - DNA, 38 bp, Artificial Sequence
  primer
gtaaaacgacggccagttttccacacctttaacgcctc

SEQ ID NO: 108033 - DNA, 39 bp, Artificial Sequence
  primer
gtaaaacgacggccagtagggcttctgagataagcacac

SEQ ID NO: 108034 - DNA, 44 bp, Artificial Sequence
  primer
gtaaaacgacggccagtagttaacatgacattagtaaaggaccc

SEQ ID NO: 108035 - DNA, 40 bp, Artificial Sequence
  primer
gtaaaacgacggccagttctgtagctatgaccgcaaagtc

SEQ ID NO: 108036 - DNA, 37 bp, Artificial Sequence
  primer
gtaaaacgacggccagtaaaggtggtggcagttgttg

SEQ ID NO: 108037 - DNA, 22 bp, Artificial Sequence
  primer
tctcacaaactggctaaacagc

SEQ ID NO: 108038 - DNA, 40 bp, Artificial Sequence
  primer
gtaaaacgacggccagttccttatttgctcctctttgagc

SEQ ID NO: 108039 - DNA, 23 bp, Artificial Sequence
  primer
ttcacctatgttcaaagagcctg

SEQ ID NO: 108040 - DNA, 22 bp, Artificial Sequence
  primer
ggccagagaagaaggttaaagc

SEQ ID NO: 108041 - DNA, 21 bp, Artificial Sequence
  primer
aggatcaatttccgatcaagc

SEQ ID NO: 108042 - DNA, 37 bp, Artificial Sequence
  primer
gtaaaacgacggccagtaaagaaacgggttgtttgcc

SEQ ID NO: 108043 - DNA, 20 bp, Artificial Sequence
  primer
acttctgctggcaatccacc

SEQ ID NO: 108044 - DNA, 21 bp, Artificial Sequence
  primer
aacaagtgcatccaatttccc

SEQ ID NO: 108045 - DNA, 20 bp, Artificial Sequence
  primer
cccaccctgactttatgacg

SEQ ID NO: 108046 - DNA, 38 bp, Artificial Sequence
  primer
gtaaaacgacggccagtaccacacccagccagaatatc

SEQ ID NO: 108047 - DNA, 20 bp, Artificial Sequence
  primer
cgaagagcaacaggtatccg

SEQ ID NO: 108048 - DNA, 21 bp, Artificial Sequence
  primer
tagaacgtgcattgaaccgac

SEQ ID NO: 108049 - DNA, 38 bp, Artificial Sequence
  primer
gtaaaacgacggccagtaaggagcatcgacgttgaaag

SEQ ID NO: 108050 - DNA, 37 bp, Artificial Sequence
  primer
gtaaaacgacggccagtaaggagcaagcggctgtaac

SEQ ID NO: 108051 - DNA, 20 bp, Artificial Sequence
  primer
aaaggcagagggtgtgtgtg

SEQ ID NO: 108052 - DNA, 20 bp, Artificial Sequence
  primer
caccagcctggcattgttag

SEQ ID NO: 108053 - DNA, 20 bp, Artificial Sequence
  primer
ctggttcatgccttggacac

SEQ ID NO: 108054 - DNA, 21 bp, Artificial Sequence
  primer
cagactcacgattcaccttcc

SEQ ID NO: 108055 - DNA, 21 bp, Artificial Sequence
  primer
gaagtcagtgtttgcagaggc

SEQ ID NO: 108056 - DNA, 22 bp, Artificial Sequence
  primer
gaggaagggactactctttggg

SEQ ID NO: 108057 - DNA, 38 bp, Artificial Sequence
  primer
gtaaaacgacggccagttctctcctgaaagcctgtgtg

SEQ ID NO: 108058 - DNA, 36 bp, Artificial Sequence
  primer
gtaaaacgacggccagtaccctcccatctccagagc

SEQ ID NO: 108059 - DNA, 21 bp, Artificial Sequence
  primer
ctacattgcactgaagcggtg

SEQ ID NO: 108060 - DNA, 38 bp, Artificial Sequence
  primer
gtaaaacgacggccagtagatcacacagccactcttgg

SEQ ID NO: 108061 - DNA, 38 bp, Artificial Sequence
  primer
gtaaaacgacggccagtaagctagagatgcagcttggg

SEQ ID NO: 108062 - DNA, 20 bp, Artificial Sequence
  primer
gggacatgaggcaggaactc

SEQ ID NO: 108063 - DNA, 38 bp, Artificial Sequence
  primer
gtaaaacgacggccagtcctgatgtgaccgagacattc

SEQ ID NO: 108064 - DNA, 38 bp, Artificial Sequence
  primer
gtaaaacgacggccagtcttcacgcacaccttagcagt

SEQ ID NO: 108065 - DNA, 21 bp, Artificial Sequence
  primer
gccttggagtagaaggactgc

SEQ ID NO: 108066 - DNA, 21 bp, Artificial Sequence
  primer
cagtttattccatggcttggg

SEQ ID NO: 108067 - DNA, 38 bp, Artificial Sequence
  primer
gtaaaacgacggccagtcaaatgtttcatcacgcacac

SEQ ID NO: 108068 - DNA, 21 bp, Artificial Sequence
  primer
tagcaatgcctcttctcaccc

SEQ ID NO: 108069 - DNA, 21 bp, Artificial Sequence
  primer
acctgcttctctctacgtgcc

SEQ ID NO: 108070 - DNA, 37 bp, Artificial Sequence
  primer
gtaaaacgacggccagttttcacctgtctcaggaccc

SEQ ID NO: 108071 - DNA, 21 bp, Artificial Sequence
  primer
gtagacctcgtactgctcggg

SEQ ID NO: 108072 - DNA, 38 bp, Artificial Sequence
  primer
gtaaaacgacggccagtaggctgcgggatagatacttg

SEQ ID NO: 108073 - DNA, 20 bp, Artificial Sequence
  primer
ctctctgcatagcccaggtg

SEQ ID NO: 108074 - DNA, 20 bp, Artificial Sequence
  primer
caaatccagaatgtgcggtc

SEQ ID NO: 108075 - DNA, 22 bp, Artificial Sequence
  primer
aagttgagactctgtggttggc

SEQ ID NO: 108076 - DNA, 39 bp, Artificial Sequence
  primer
gtaaaacgacggccagtcctcatcagctgtgtgtgaaag

SEQ ID NO: 108077 - DNA, 18 bp, Artificial Sequence
  primer
accaatcaccgagctccc

SEQ ID NO: 108078 - DNA, 20 bp, Artificial Sequence
  primer
tctccctgagacttgggctc

SEQ ID NO: 108079 - DNA, 18 bp, Artificial Sequence
  primer
aagttcgcggccttcttc

SEQ ID NO: 108080 - DNA, 19 bp, Artificial Sequence
  primer
ccctcagaactcccattcg

SEQ ID NO: 108081 - DNA, 39 bp, Artificial Sequence
  primer
gtaaaacgacggccagtcggcgagatcaattcctaatac

SEQ ID NO: 108082 - DNA, 38 bp, Artificial Sequence
  primer
gtaaaacgacggccagtagcaccactaggccaagaaac

SEQ ID NO: 108083 - DNA, 38 bp, Artificial Sequence
  primer
gtaaaacgacggccagtgacagggaagcttctccaaag

SEQ ID NO: 108084 - DNA, 38 bp, Artificial Sequence
  primer
gtaaaacgacggccagtccacctcaaagtccctgtgtc

SEQ ID NO: 108085 - DNA, 38 bp, Artificial Sequence
  primer
gtaaaacgacggccagtgttaccaaaggccttcacctg

SEQ ID NO: 108086 - DNA, 38 bp, Artificial Sequence
  primer
gtaaaacgacggccagttttctcatctcggtctccagc

SEQ ID NO: 108087 - DNA, 37 bp, Artificial Sequence
  primer
gtaaaacgacggccagtaacacctggatgtggcagac

SEQ ID NO: 108088 - DNA, 21 bp, Artificial Sequence
  primer
gtcagagggaggaggtgtgtc

SEQ ID NO: 108089 - DNA, 38 bp, Artificial Sequence
  primer
gtaaaacgacggccagtagtcccttcctcctcatctgg

SEQ ID NO: 108090 - DNA, 21 bp, Artificial Sequence
  primer
gctcaccgtatgcacagagac

SEQ ID NO: 108091 - DNA, 21 bp, Artificial Sequence
  primer
agcaaagaaagatggtgaggc

SEQ ID NO: 108092 - DNA, 22 bp, Artificial Sequence
  primer
gcctgaggatggttaaggtttg

SEQ ID NO: 108093 - DNA, 21 bp, Artificial Sequence
  primer
ggagacaagaggcaggttgag

SEQ ID NO: 108094 - DNA, 21 bp, Artificial Sequence
  primer
caatgcacacctgttgttctg

SEQ ID NO: 108095 - DNA, 20 bp, Artificial Sequence
  primer
acagcgagaaagtccgagtg

SEQ ID NO: 108096 - DNA, 20 bp, Artificial Sequence
  primer
ccgacaggaactgcttcatc

SEQ ID NO: 108097 - DNA, 38 bp, Artificial Sequence
  primer
gtaaaacgacggccagtcgccagtacattctgctcatc

SEQ ID NO: 108098 - DNA, 37 bp, Artificial Sequence
  primer
gtaaaacgacggccagtggtggtagagctgggctttg

SEQ ID NO: 108099 - DNA, 37 bp, Artificial Sequence
  primer
gtaaaacgacggccagtgatccaccttggattccctc

SEQ ID NO: 108100 - DNA, 37 bp, Artificial Sequence
  primer
gtaaaacgacggccagtcgatctcggacttgaccttg

SEQ ID NO: 108101 - DNA, 36 bp, Artificial Sequence
  primer
gtaaaacgacggccagtgttgggctggccagagtag

SEQ ID NO: 108102 - DNA, 21 bp, Artificial Sequence
  primer
tgtacagctcgtactgctcgg

SEQ ID NO: 108103 - DNA, 38 bp, Artificial Sequence
  primer
gtaaaacgacggccagtcagcaggactcaggaatgaag

SEQ ID NO: 108104 - DNA, 38 bp, Artificial Sequence
  primer
gtaaaacgacggccagtggtagactcgggcagtaaagc

SEQ ID NO: 108105 - DNA, 36 bp, Artificial Sequence
  primer
gtaaaacgacggccagtcaaactcctggcctcaagc

SEQ ID NO: 108106 - DNA, 21 bp, Artificial Sequence
  primer
tgggtttatgtgggttacagc

SEQ ID NO: 108107 - DNA, 37 bp, Artificial Sequence
  primer
gtaaaacgacggccagtgggtcttccatctcccagag

SEQ ID NO: 108108 - DNA, 21 bp, Artificial Sequence
  primer
acttaaagggtccgggtgaag

SEQ ID NO: 108109 - DNA, 38 bp, Artificial Sequence
  primer
gtaaaacgacggccagtttaccagggtatgtcccttgc

SEQ ID NO: 108110 - DNA, 38 bp, Artificial Sequence
  primer
gtaaaacgacggccagttttgatggttgagttcctccc

SEQ ID NO: 108111 - DNA, 41 bp, Artificial Sequence
  primer
gtaaaacgacggccagtgggccaacagatataaacactttg

SEQ ID NO: 108112 - DNA, 21 bp, Artificial Sequence
  primer
tcatcacgatggttgtcagtg

SEQ ID NO: 108113 - DNA, 27 bp, Artificial Sequence
  primer
tgcacatgtaagttagagaactactgc

SEQ ID NO: 108114 - DNA, 22 bp, Artificial Sequence
  primer
ggtttacgaagacaaacctggg

SEQ ID NO: 108115 - DNA, 41 bp, Artificial Sequence
  primer
gtaaaacgacggccagtgcaaataggaatagccacaggtag

SEQ ID NO: 108116 - DNA, 38 bp, Artificial Sequence
  primer
gtaaaacgacggccagtagcaagcattaccctgactgc

SEQ ID NO: 108117 - DNA, 21 bp, Artificial Sequence
  primer
tcgtaggttggagatgcaaag

SEQ ID NO: 108118 - DNA, 43 bp, Artificial Sequence
  primer
gtaaaacgacggccagtacatgcttaagagttactggatttga

SEQ ID NO: 108119 - DNA, 36 bp, Artificial Sequence
  primer
gtaaaacgacggccagtgtcactttcaggcccttcc

SEQ ID NO: 108120 - DNA, 22 bp, Artificial Sequence
  primer
ccaggcaaagacatcacctaag

SEQ ID NO: 108121 - DNA, 39 bp, Artificial Sequence
  primer
gtaaaacgacggccagtttcctatgctcatgaagggaac

SEQ ID NO: 108122 - DNA, 39 bp, Artificial Sequence
  primer
gtaaaacgacggccagtgcgccggatagtcttaataatg

SEQ ID NO: 108123 - DNA, 19 bp, Artificial Sequence
  primer
gggtatggtcacacacgcc

SEQ ID NO: 108124 - DNA, 24 bp, Artificial Sequence
  primer
tgctttgatcagttgacagaactt

SEQ ID NO: 108125 - DNA, 42 bp, Artificial Sequence
  primer
gtaaaacgacggccagtcaaatggaaccaagatgttatatgg

SEQ ID NO: 108126 - DNA, 37 bp, Artificial Sequence
  primer
gtaaaacgacggccagtctgagaccttgcagtcaggg

SEQ ID NO: 108127 - DNA, 22 bp, Artificial Sequence
  primer
aacgtctgaatccagtttggac

SEQ ID NO: 108128 - DNA, 21 bp, Artificial Sequence
  primer
gactcattgcacaattctccc

SEQ ID NO: 108129 - DNA, 22 bp, Artificial Sequence
  primer
aactataccacgtgatggtggc

SEQ ID NO: 108130 - DNA, 19 bp, Artificial Sequence
  primer
gagctcaggcaatccaacc

SEQ ID NO: 108131 - DNA, 19 bp, Artificial Sequence
  primer
gtagccaggtatggtggcg

SEQ ID NO: 108132 - DNA, 38 bp, Artificial Sequence
  primer
gtaaaacgacggccagtatcaattgtcccatgtagccc

SEQ ID NO: 108133 - DNA, 21 bp, Artificial Sequence
  primer
agttatgccactgcaatcctg

SEQ ID NO: 108134 - DNA, 44 bp, Artificial Sequence
  primer
gtaaaacgacggccagtctgatgtatttcatagttgttctcact

SEQ ID NO: 108135 - DNA, 21 bp, Artificial Sequence
  primer
tatctgggagtggtgacatgc

SEQ ID NO: 108136 - DNA, 38 bp, Artificial Sequence
  primer
gtaaaacgacggccagtttcaattcttcatggcacaaa

SEQ ID NO: 108137 - DNA, 21 bp, Artificial Sequence
  primer
tcagtactggtttccgatggc

SEQ ID NO: 108138 - DNA, 39 bp, Artificial Sequence
  primer
gtaaaacgacggccagtttggagggtcatctctcaagac

SEQ ID NO: 108139 - DNA, 19 bp, Artificial Sequence
  primer
gggattacaggcatggtgc

SEQ ID NO: 108140 - DNA, 18 bp, Artificial Sequence
  primer
tgaacgtgggaggcagag

SEQ ID NO: 108141 - DNA, 40 bp, Artificial Sequence
  primer
gtaaaacgacggccagtcaacatcatttcctaccttccaa

SEQ ID NO: 108142 - DNA, 27 bp, Artificial Sequence
  primer
aaatgaatcaagattagagagaaccag

SEQ ID NO: 108143 - DNA, 41 bp, Artificial Sequence
  primer
gtaaaacgacggccagtgggaaagacccaataaacaagtaa

SEQ ID NO: 108144 - DNA, 46 bp, Artificial Sequence
  primer
gtaaaacgacggccagttgaagttatacctattggaatttatcaca

SEQ ID NO: 108145 - DNA, 37 bp, Artificial Sequence
  primer
gtaaaacgacggccagtcccggcctatttcatttctt

SEQ ID NO: 108146 - DNA, 38 bp, Artificial Sequence
  primer
gtaaaacgacggccagtgtcactcaaccaaatggtccc

SEQ ID NO: 108147 - DNA, 22 bp, Artificial Sequence
  primer
tggagcagtactcaccaatttc

SEQ ID NO: 108148 - DNA, 21 bp, Artificial Sequence
  primer
gacctgagggtcagttgcttc

SEQ ID NO: 108149 - DNA, 38 bp, Artificial Sequence
  primer
gtaaaacgacggccagtagtccaggtgtgagaagggac

SEQ ID NO: 108150 - DNA, 38 bp, Artificial Sequence
  primer
gtaaaacgacggccagtatgcagtgcgtagacctgatg

SEQ ID NO: 108151 - DNA, 38 bp, Artificial Sequence
  primer
gtaaaacgacggccagtaattgggaacactgacccttg

SEQ ID NO: 108152 - DNA, 37 bp, Artificial Sequence
  primer
gtaaaacgacggccagtggatacagccacgtctgagc

SEQ ID NO: 108153 - DNA, 21 bp, Artificial Sequence
  primer
tgtcaggcttgagggatagac

SEQ ID NO: 108154 - DNA, 21 bp, Artificial Sequence
  primer
cggaggtgtggacgtagattc

SEQ ID NO: 108155 - DNA, 38 bp, Artificial Sequence
  primer
gtaaaacgacggccagtcctcagaggtctttgcctcag

SEQ ID NO: 108156 - DNA, 37 bp, Artificial Sequence
  primer
gtaaaacgacggccagttgaggagacagggaccacag

SEQ ID NO: 108157 - DNA, 39 bp, Artificial Sequence
  primer
gtaaaacgacggccagtcagggacaggagtgataaggac

SEQ ID NO: 108158 - DNA, 37 bp, Artificial Sequence
  primer
gtaaaacgacggccagtctccaatcatcccagctcag

SEQ ID NO: 108159 - DNA, 21 bp, Artificial Sequence
  primer
cgatgaagaagaaggcggtag

SEQ ID NO: 108160 - DNA, 38 bp, Artificial Sequence
  primer
gtaaaacgacggccagtgctttgtgaacatgaactggg

SEQ ID NO: 108161 - DNA, 21 bp, Artificial Sequence
  primer
tcaggcaacaatggctaaatg

SEQ ID NO: 108162 - DNA, 21 bp, Artificial Sequence
  primer
atcaggttcaggaactccagg

SEQ ID NO: 108163 - DNA, 21 bp, Artificial Sequence
  primer
agaagcctcagctctcttccc

SEQ ID NO: 108164 - DNA, 21 bp, Artificial Sequence
  primer
tgcaggacatagacgctgaag

SEQ ID NO: 108165 - DNA, 20 bp, Artificial Sequence
  primer
acagcatcagcagggacttc

SEQ ID NO: 108166 - DNA, 37 bp, Artificial Sequence
  primer
gtaaaacgacggccagtctgacaccctggatgtacgc

SEQ ID NO: 108167 - DNA, 38 bp, Artificial Sequence
  primer
gtaaaacgacggccagtcacacccactcagacttcctg

SEQ ID NO: 108168 - DNA, 39 bp, Artificial Sequence
  primer
gtaaaacgacggccagtcgagggtctcattatgttgtcc

SEQ ID NO: 108169 - DNA, 38 bp, Artificial Sequence
  primer
gtaaaacgacggccagtctgtctttctcaaaggccctg

SEQ ID NO: 108170 - DNA, 38 bp, Artificial Sequence
  primer
gtaaaacgacggccagtcttctcagtgggcctggatac

SEQ ID NO: 108171 - DNA, 38 bp, Artificial Sequence
  primer
gtaaaacgacggccagttttcccattggaagggtctac

SEQ ID NO: 108172 - DNA, 38 bp, Artificial Sequence
  primer
gtaaaacgacggccagtgatctgtgagaggctcacctg

SEQ ID NO: 108173 - DNA, 21 bp, Artificial Sequence
  primer
tagttccatgatcggtagggc

SEQ ID NO: 108174 - DNA, 21 bp, Artificial Sequence
  primer
cctttgctcactcattcccac

SEQ ID NO: 108175 - DNA, 35 bp, Artificial Sequence
  primer
gtaaaacgacggccagtccctgtgcaattctgccc

SEQ ID NO: 108176 - DNA, 37 bp, Artificial Sequence
  primer
gtaaaacgacggccagtgcttccttcctagctccctg

SEQ ID NO: 108177 - DNA, 39 bp, Artificial Sequence
  primer
gtaaaacgacggccagtcctagcttagggttcttcctcc

SEQ ID NO: 108178 - DNA, 22 bp, Artificial Sequence
  primer
ggccctatctcaaatcacacac

SEQ ID NO: 108179 - DNA, 41 bp, Artificial Sequence
  primer
gtaaaacgacggccagtcacacttgctgactgaactaaagg

SEQ ID NO: 108180 - DNA, 38 bp, Artificial Sequence
  primer
gtaaaacgacggccagtagaaagatgctttgggtggtt

SEQ ID NO: 108181 - DNA, 27 bp, Artificial Sequence
  primer
tccgtacagttcctgattaacttattt

SEQ ID NO: 108182 - DNA, 38 bp, Artificial Sequence
  primer
gtaaaacgacggccagtcacactttggatgttcttggg

SEQ ID NO: 108183 - DNA, 37 bp, Artificial Sequence
  primer
gtaaaacgacggccagtatctcgtgaggcaggaggtc

SEQ ID NO: 108184 - DNA, 21 bp, Artificial Sequence
  primer
attgggaatatcctctggcac

SEQ ID NO: 108185 - DNA, 21 bp, Artificial Sequence
  primer
gcgatgctcaaacacattagg

SEQ ID NO: 108186 - DNA, 20 bp, Artificial Sequence
  primer
ctcatctctgtccgcattcc

SEQ ID NO: 108187 - DNA, 21 bp, Artificial Sequence
  primer
atggcatacgcagttctgaag

SEQ ID NO: 108188 - DNA, 21 bp, Artificial Sequence
  primer
gagggcgtggtggtaacatac

SEQ ID NO: 108189 - DNA, 38 bp, Artificial Sequence
  primer
gtaaaacgacggccagtgtagggaagtgatgggagagg

SEQ ID NO: 108190 - DNA, 37 bp, Artificial Sequence
  primer
gtaaaacgacggccagtcatgtccaccatttctgtgc

SEQ ID NO: 108191 - DNA, 21 bp, Artificial Sequence
  primer
tgcttcgatttgggatttagg

SEQ ID NO: 108192 - DNA, 21 bp, Artificial Sequence
  primer
gggaagctgttacaaccaagg

SEQ ID NO: 108193 - DNA, 37 bp, Artificial Sequence
  primer
gtaaaacgacggccagtctttgggcagtggaattctg

SEQ ID NO: 108194 - DNA, 20 bp, Artificial Sequence
  primer
agtagggctttgaacgcgac

SEQ ID NO: 108195 - DNA, 38 bp, Artificial Sequence
  primer
gtaaaacgacggccagtgccaagttcaaggttggacac

SEQ ID NO: 108196 - DNA, 21 bp, Artificial Sequence
  primer
gccctttcatctctcacaagg

SEQ ID NO: 108197 - DNA, 21 bp, Artificial Sequence
  primer
tttagtcagacttccctgcgg

SEQ ID NO: 108198 - DNA, 37 bp, Artificial Sequence
  primer
gtaaaacgacggccagtcagggctgctgcaaactaag

SEQ ID NO: 108199 - DNA, 21 bp, Artificial Sequence
  primer
gagctgctggaatgagctacc

SEQ ID NO: 108200 - DNA, 21 bp, Artificial Sequence
  primer
tgaagaagcttgagtttgccc

SEQ ID NO: 108201 - DNA, 36 bp, Artificial Sequence
  primer
gtaaaacgacggccagtgcctagaaattggcgcttg

SEQ ID NO: 108202 - DNA, 38 bp, Artificial Sequence
  primer
gtaaaacgacggccagtgaaatgtttgttagcccgacc

SEQ ID NO: 108203 - DNA, 20 bp, Artificial Sequence
  primer
ttgctgtggatgttgtggtg

SEQ ID NO: 108204 - DNA, 21 bp, Artificial Sequence
  primer
atgcctgtgagaaagaaaggc

SEQ ID NO: 108205 - DNA, 38 bp, Artificial Sequence
  primer
gtaaaacgacggccagtcttcatccactcaactccgtg

SEQ ID NO: 108206 - DNA, 21 bp, Artificial Sequence
  primer
agttcaggctggaccagagag

SEQ ID NO: 108207 - DNA, 38 bp, Artificial Sequence
  primer
gtaaaacgacggccagtgaaggttctaggaatgtgcgg

SEQ ID NO: 108208 - DNA, 21 bp, Artificial Sequence
  primer
gaatggtggtttcattgggac

SEQ ID NO: 108209 - DNA, 39 bp, Artificial Sequence
  primer
gtaaaacgacggccagtgggttcaaaggtccagtttacc

SEQ ID NO: 108210 - DNA, 38 bp, Artificial Sequence
  primer
gtaaaacgacggccagtaggtttccagccacctgagag

SEQ ID NO: 108211 - DNA, 21 bp, Artificial Sequence
  primer
tgggaggatcacttgactcag

SEQ ID NO: 108212 - DNA, 39 bp, Artificial Sequence
  primer
gtaaaacgacggccagttcctagggaagaagagactcgc

SEQ ID NO: 108213 - DNA, 38 bp, Artificial Sequence
  primer
gtaaaacgacggccagtggaatctcgtgagacaggagg

SEQ ID NO: 108214 - DNA, 38 bp, Artificial Sequence
  primer
gtaaaacgacggccagtactgggaatatcctctggcac

SEQ ID NO: 108215 - DNA, 20 bp, Artificial Sequence
  primer
acacattaggcgcaatccag

SEQ ID NO: 108216 - DNA, 22 bp, Artificial Sequence
  primer
ggacgctcctagggaagaatag

SEQ ID NO: 108217 - DNA, 38 bp, Artificial Sequence
  primer
gtaaaacgacggccagtaattccgtgagacaggaggtc

SEQ ID NO: 108218 - DNA, 38 bp, Artificial Sequence
  primer
gtaaaacgacggccagtttaggcctggaaatggaagac

SEQ ID NO: 108219 - DNA, 38 bp, Artificial Sequence
  primer
gtaaaacgacggccagttaagtcctttccagctgtccc

SEQ ID NO: 108220 - DNA, 21 bp, Artificial Sequence
  primer
cctttatagggcaggttgctg

SEQ ID NO: 108221 - DNA, 38 bp, Artificial Sequence
  primer
gtaaaacgacggccagttaccaaggttgaagacccagg

SEQ ID NO: 108222 - DNA, 22 bp, Artificial Sequence
  primer
aaactttcccaattcaacaacc

SEQ ID NO: 108223 - DNA, 21 bp, Artificial Sequence
  primer
agcttaagcggcaaacatagg

SEQ ID NO: 108224 - DNA, 37 bp, Artificial Sequence
  primer
gtaaaacgacggccagtacagcagagacaggaccagc

SEQ ID NO: 108225 - DNA, 37 bp, Artificial Sequence
  primer
gtaaaacgacggccagtatgagccacaaaggttgacg

SEQ ID NO: 108226 - DNA, 23 bp, Artificial Sequence
  primer
aaggtttacccagaacattccag

SEQ ID NO: 108227 - DNA, 22 bp, Artificial Sequence
  primer
aaacttcagggagaagcgtagg

SEQ ID NO: 108228 - DNA, 38 bp, Artificial Sequence
  primer
gtaaaacgacggccagtcaatgcaggcagaacattcac

SEQ ID NO: 108229 - DNA, 21 bp, Artificial Sequence
  primer
tgtttgtatgggcaagcactc

SEQ ID NO: 108230 - DNA, 21 bp, Artificial Sequence
  primer
cccaaggaacacacattcttc

SEQ ID NO: 108231 - DNA, 38 bp, Artificial Sequence
  primer
gtaaaacgacggccagttcctcctttggaatgatagcg

SEQ ID NO: 108232 - DNA, 21 bp, Artificial Sequence
  primer
cagtgctgtttctgccacaac

SEQ ID NO: 108233 - DNA, 21 bp, Artificial Sequence
  primer
gtagagctgggtggcatgaac

SEQ ID NO: 108234 - DNA, 21 bp, Artificial Sequence
  primer
tgggaagttgtattggcagtg

SEQ ID NO: 108235 - DNA, 21 bp, Artificial Sequence
  primer
ctacaaaggcatagagcagcg

SEQ ID NO: 108236 - DNA, 21 bp, Artificial Sequence
  primer
aagtcagactgtgggcgaaag

SEQ ID NO: 108237 - DNA, 37 bp, Artificial Sequence
  primer
gtaaaacgacggccagtcagctaaggagcagcaatgg

SEQ ID NO: 108238 - DNA, 21 bp, Artificial Sequence
  primer
tagcggtccagactgatgaag

SEQ ID NO: 108239 - DNA, 21 bp, Artificial Sequence
  primer
ttccaggaggatgaaggagtc

SEQ ID NO: 108240 - DNA, 21 bp, Artificial Sequence
  primer
atgaatgtccacctcgctttc

SEQ ID NO: 108241 - DNA, 21 bp, Artificial Sequence
  primer
aaagattccaatcctgctccc

SEQ ID NO: 108242 - DNA, 21 bp, Artificial Sequence
  primer
tagcggtccagactgatgaag

SEQ ID NO: 108243 - DNA, 21 bp, Artificial Sequence
  primer
ttccaggaggatgaaggagtc

SEQ ID NO: 108244 - DNA, 21 bp, Artificial Sequence
  primer
atgaatgtccacctcgctttc

SEQ ID NO: 108245 - DNA, 21 bp, Artificial Sequence
  primer
gggtaggttcaccaggaacac

SEQ ID NO: 108246 - DNA, 21 bp, Artificial Sequence
  primer
gacaatcatggtgagcagtgg

SEQ ID NO: 108247 - DNA, 21 bp, Artificial Sequence
  primer
gtaagggaggcaaccaatgtc

SEQ ID NO: 108248 - DNA, 38 bp, Artificial Sequence
  primer
gtaaaacgacggccagtaaccctggcaaggcctataac

SEQ ID NO: 108249 - DNA, 38 bp, Artificial Sequence
  primer
gtaaaacgacggccagttcagcattcttggagatggag

SEQ ID NO: 108250 - DNA, 22 bp, Artificial Sequence
  primer
cttagccacaggtatattcgga

SEQ ID NO: 108251 - DNA, 21 bp, Artificial Sequence
  primer
caagagagaggaacagccagg

SEQ ID NO: 108252 - DNA, 38 bp, Artificial Sequence
  primer
gtaaaacgacggccagtcagagtccatttcaatgctgg

SEQ ID NO: 108253 - DNA, 38 bp, Artificial Sequence
  primer
gtaaaacgacggccagtgatgtctgacactggcaccac

SEQ ID NO: 108254 - DNA, 21 bp, Artificial Sequence
  primer
cgtcccgtggctataggtaac

SEQ ID NO: 108255 - DNA, 22 bp, Artificial Sequence
  primer
aagcacctctaaagtggctgtg

SEQ ID NO: 108256 - DNA, 21 bp, Artificial Sequence
  primer
catagcaatggaaaggctgac

SEQ ID NO: 108257 - DNA, 22 bp, Artificial Sequence
  primer
aagcaaggcagtatctgtctcc

SEQ ID NO: 108258 - DNA, 21 bp, Artificial Sequence
  primer
gttctgaaacacccgtgacag

SEQ ID NO: 108259 - DNA, 21 bp, Artificial Sequence
  primer
taaatgtttcaaacggccttg

SEQ ID NO: 108260 - DNA, 21 bp, Artificial Sequence
  primer
agatttctgcctcagtcctgg

SEQ ID NO: 108261 - DNA, 37 bp, Artificial Sequence
  primer
gtaaaacgacggccagtaaatgccactggaggatcac

SEQ ID NO: 108262 - DNA, 38 bp, Artificial Sequence
  primer
gtaaaacgacggccagtctgccaggaaagaagtcacag

SEQ ID NO: 108263 - DNA, 21 bp, Artificial Sequence
  primer
gcagcctcctgtaccacataa

SEQ ID NO: 108264 - DNA, 21 bp, Artificial Sequence
  primer
atgatggtggaagtggtgagc

SEQ ID NO: 108265 - DNA, 36 bp, Artificial Sequence
  primer
gtaaaacgacggccagtataggcacaagcctggcac

SEQ ID NO: 108266 - DNA, 19 bp, Artificial Sequence
  primer
gatcagttgcgctgtctgc

SEQ ID NO: 108267 - DNA, 38 bp, Artificial Sequence
  primer
gtaaaacgacggccagtagtgggtaagtgggtaggtgg

SEQ ID NO: 108268 - DNA, 43 bp, Artificial Sequence
  primer
gtaaaacgacggccagtgatgacaggctaaatcactctagtcc

SEQ ID NO: 108269 - DNA, 19 bp, Artificial Sequence
  primer
gtgtgagtcaccaccgcac

SEQ ID NO: 108270 - DNA, 20 bp, Artificial Sequence
  primer
gcatggagaagacaagcagc

SEQ ID NO: 108271 - DNA, 39 bp, Artificial Sequence
  primer
gtaaaacgacggccagtgaatgagtgattccactctggc

SEQ ID NO: 108272 - DNA, 22 bp, Artificial Sequence
  primer
ttccagccttaagttgagaagg

SEQ ID NO: 108273 - DNA, 21 bp, Artificial Sequence
  primer
cacaccctccacccatctaac

SEQ ID NO: 108274 - DNA, 38 bp, Artificial Sequence
  primer
gtaaaacgacggccagttgctagtctggcctcacctaa

SEQ ID NO: 108275 - DNA, 37 bp, Artificial Sequence
  primer
gtaaaacgacggccagtggtacccaatgtgcctggac

SEQ ID NO: 108276 - DNA, 19 bp, Artificial Sequence
  primer
tctggcgcataagccaaac

SEQ ID NO: 108277 - DNA, 19 bp, Artificial Sequence
  primer
gtagcaggcacctcttggc

SEQ ID NO: 108278 - DNA, 22 bp, Artificial Sequence
  primer
ccctctccactatctctgctcc

SEQ ID NO: 108279 - DNA, 19 bp, Artificial Sequence
  primer
tgggcgacaagagtgaaac

SEQ ID NO: 108280 - DNA, 20 bp, Artificial Sequence
  primer
ctgggcaacaaagtgagacc

SEQ ID NO: 108281 - DNA, 38 bp, Artificial Sequence
  primer
gtaaaacgacggccagtgaaatcaaatgcctggaggag

SEQ ID NO: 108282 - DNA, 23 bp, Artificial Sequence
  primer
ttatatcctcctctagcttgggc

SEQ ID NO: 108283 - DNA, 36 bp, Artificial Sequence
  primer
gtaaaacgacggccagtctcaaatgattccgcccac

SEQ ID NO: 108284 - DNA, 21 bp, Artificial Sequence
  primer
agcgactctccaagatgaagg

SEQ ID NO: 108285 - DNA, 20 bp, Artificial Sequence
  primer
agatggccaatacccagagg

SEQ ID NO: 108286 - DNA, 38 bp, Artificial Sequence
  primer
gtaaaacgacggccagtatgaagctaagccctctggtc

SEQ ID NO: 108287 - DNA, 20 bp, Artificial Sequence
  primer
aatccctccaggctagaccc

SEQ ID NO: 108288 - DNA, 18 bp, Artificial Sequence
  primer
ggtgatctacccgccttg

SEQ ID NO: 108289 - DNA, 21 bp, Artificial Sequence
  primer
gatgacaaggctctacctggg

SEQ ID NO: 108290 - DNA, 40 bp, Artificial Sequence
  primer
gtaaaacgacggccagtaacactaatttgcatgaagggtg

SEQ ID NO: 108291 - DNA, 20 bp, Artificial Sequence
  primer
tctgcctctgggttcaagtg

SEQ ID NO: 108292 - DNA, 42 bp, Artificial Sequence
  primer
gtaaaacgacggccagtgggaaattaggtaaagggtagtcag

SEQ ID NO: 108293 - DNA, 24 bp, Artificial Sequence
  primer
cagaggacatctgagtagatctgg

SEQ ID NO: 108294 - DNA, 38 bp, Artificial Sequence
  primer
gtaaaacgacggccagttgtcttgcatcaaggaagtgg

SEQ ID NO: 108295 - DNA, 26 bp, Artificial Sequence
  primer
gacttattgttattccttcaactgcc

SEQ ID NO: 108296 - DNA, 38 bp, Artificial Sequence
  primer
gtaaaacgacggccagtatggcctaaagagactgtgcc

SEQ ID NO: 108297 - DNA, 24 bp, Artificial Sequence
  primer
cccataaatgcatcactcagattc

SEQ ID NO: 108298 - DNA, 39 bp, Artificial Sequence
  primer
gtaaaacgacggccagtaattcatgatcttgctccttgc

SEQ ID NO: 108299 - DNA, 23 bp, Artificial Sequence
  primer
ggcgattactacaggtgtcaatg

SEQ ID NO: 108300 - DNA, 21 bp, Artificial Sequence
  primer
caagtaggtctctctgctggc

SEQ ID NO: 108301 - DNA, 21 bp, Artificial Sequence
  primer
ctgtcatgaaacacggtgtcc

SEQ ID NO: 108302 - DNA, 38 bp, Artificial Sequence
  primer
gtaaaacgacggccagtttgcaataggcggctaaagac

SEQ ID NO: 108303 - DNA, 39 bp, Artificial Sequence
  primer
gtaaaacgacggccagttgattcacacatgacttccagc

SEQ ID NO: 108304 - DNA, 19 bp, Artificial Sequence
  primer
ggcaaagagagacgcagtg

SEQ ID NO: 108305 - DNA, 42 bp, Artificial Sequence
  primer
gtaaaacgacggccagtttcaactgtcaggaaactatgtcag

SEQ ID NO: 108306 - DNA, 25 bp, Artificial Sequence
  primer
tttcttgaattgttgcctatcagtc

SEQ ID NO: 108307 - DNA, 21 bp, Artificial Sequence
  primer
tcacatctgcagggttaaacg

SEQ ID NO: 108308 - DNA, 40 bp, Artificial Sequence
  primer
gtaaaacgacggccagtaatcaaatctatctgcccatgtt

SEQ ID NO: 108309 - DNA, 38 bp, Artificial Sequence
  primer
gtaaaacgacggccagtacttgtgccttctggcaagtt

SEQ ID NO: 108310 - DNA, 25 bp, Artificial Sequence
  primer
tttaaggtctcttgaacatgtttgc

SEQ ID NO: 108311 - DNA, 39 bp, Artificial Sequence
  primer
gtaaaacgacggccagtcatgttgtttctaatcctccgc

SEQ ID NO: 108312 - DNA, 35 bp, Artificial Sequence
  primer
gtaaaacgacggccagtctcggtcgttgggaaatg

SEQ ID NO: 108313 - DNA, 24 bp, Artificial Sequence
  primer
aacaaccatgtcactccatgtaaa

SEQ ID NO: 108314 - DNA, 22 bp, Artificial Sequence
  primer
tccctgtctcaagatctgcttc

SEQ ID NO: 108315 - DNA, 21 bp, Artificial Sequence
  primer
cttgtggagtggatggttctg

SEQ ID NO: 108316 - DNA, 19 bp, Artificial Sequence
  primer
gcatgagagtgatggcagc

SEQ ID NO: 108317 - DNA, 43 bp, Artificial Sequence
  primer
gtaaaacgacggccagttgcacatatagcttctatgtttggag

SEQ ID NO: 108318 - DNA, 40 bp, Artificial Sequence
  primer
gtaaaacgacggccagttgcaggtgtttacctgtatctcg

SEQ ID NO: 108319 - DNA, 37 bp, Artificial Sequence
  primer
gtaaaacgacggccagtagtgagcaggttcggaaagc

SEQ ID NO: 108320 - DNA, 21 bp, Artificial Sequence
  primer
attcctgggtttcaatcctcc

SEQ ID NO: 108321 - DNA, 26 bp, Artificial Sequence
  primer
aacatataagatggatttgaaggagc

SEQ ID NO: 108322 - DNA, 38 bp, Artificial Sequence
  primer
gtaaaacgacggccagttattggtgatccctgcacatt

SEQ ID NO: 108323 - DNA, 21 bp, Artificial Sequence
  primer
cccacctagagtcactccacc

SEQ ID NO: 108324 - DNA, 41 bp, Artificial Sequence
  primer
gtaaaacgacggccagtacacagcctcacaactgtattacc

SEQ ID NO: 108325 - DNA, 24 bp, Artificial Sequence
  primer
tgccttagtgtcacttctaactcc

SEQ ID NO: 108326 - DNA, 20 bp, Artificial Sequence
  primer
ggcgactgagtgacaccttg

SEQ ID NO: 108327 - DNA, 38 bp, Artificial Sequence
  primer
gtaaaacgacggccagtaaacgaactgaacgaaggtgc

SEQ ID NO: 108328 - DNA, 20 bp, Artificial Sequence
  primer
gctcctctgttgtctgtggg

SEQ ID NO: 108329 - DNA, 19 bp, Artificial Sequence
  primer
ctctgaaagggctgatggg

SEQ ID NO: 108330 - DNA, 23 bp, Artificial Sequence
  primer
tgaaataacatgcaaaccattcc

SEQ ID NO: 108331 - DNA, 37 bp, Artificial Sequence
  primer
gtaaaacgacggccagtctgtgcaagtagcaccgtgg

SEQ ID NO: 108332 - DNA, 38 bp, Artificial Sequence
  primer
gtaaaacgacggccagttgtaaatcgacaaccacaggg

SEQ ID NO: 108333 - DNA, 21 bp, Artificial Sequence
  primer
tgcctagaacgtctaacaccc

SEQ ID NO: 108334 - DNA, 39 bp, Artificial Sequence
  primer
gtaaaacgacggccagtcacatgcaacagacaaatcacc

SEQ ID NO: 108335 - DNA, 39 bp, Artificial Sequence
  primer
gtaaaacgacggccagtttggtaaatgcatgataatggg

SEQ ID NO: 108336 - DNA, 22 bp, Artificial Sequence
  primer
cgttgaacagcctttggaatag

SEQ ID NO: 108337 - DNA, 40 bp, Artificial Sequence
  primer
gtaaaacgacggccagttggccaacataagagttgatacc

SEQ ID NO: 108338 - DNA, 21 bp, Artificial Sequence
  primer
cctcgacctctgtccagtacc

SEQ ID NO: 108339 - DNA, 27 bp, Artificial Sequence
  primer
gagaacacatcttaagttcaaaccact

SEQ ID NO: 108340 - DNA, 24 bp, Artificial Sequence
  primer
aatggcatatttggaaatgtaagg

SEQ ID NO: 108341 - DNA, 21 bp, Artificial Sequence
  primer
ctcaaatttgccctgggtatc

SEQ ID NO: 108342 - DNA, 39 bp, Artificial Sequence
  primer
gtaaaacgacggccagtccaatcaagcttcctacgagtc

SEQ ID NO: 108343 - DNA, 21 bp, Artificial Sequence
  primer
aatttagcatagggcctggtc

SEQ ID NO: 108344 - DNA, 21 bp, Artificial Sequence
  primer
cgttctgcatcaaagacttcc

SEQ ID NO: 108345 - DNA, 40 bp, Artificial Sequence
  primer
gtaaaacgacggccagtttccctctagcactagaattggc

SEQ ID NO: 108346 - DNA, 22 bp, Artificial Sequence
  primer
tgctatatgccctgaaacttcc

SEQ ID NO: 108347 - DNA, 38 bp, Artificial Sequence
  primer
gtaaaacgacggccagtagacccagctggtgtacaagg

SEQ ID NO: 108348 - DNA, 19 bp, Artificial Sequence
  primer
gaccacctccgcaagctac

SEQ ID NO: 108349 - DNA, 37 bp, Artificial Sequence
  primer
gtaaaacgacggccagttccctgtgggtcagggatac

SEQ ID NO: 108350 - DNA, 20 bp, Artificial Sequence
  primer
aaacaggttcagagccagcc

SEQ ID NO: 108351 - DNA, 21 bp, Artificial Sequence
  primer
gtacctgacttgcctcatccc

SEQ ID NO: 108352 - DNA, 21 bp, Artificial Sequence
  primer
cactgtaatgctcccagggtc

SEQ ID NO: 108353 - DNA, 21 bp, Artificial Sequence
  primer
gctcccacccatattacatcc

SEQ ID NO: 108354 - DNA, 21 bp, Artificial Sequence
  primer
cagacagaccacagcttctcc

SEQ ID NO: 108355 - DNA, 38 bp, Artificial Sequence
  primer
gtaaaacgacggccagttgtgttggtgaattctggagg

SEQ ID NO: 108356 - DNA, 22 bp, Artificial Sequence
  primer
ggtcttaggatcctggagttgg

SEQ ID NO: 108357 - DNA, 21 bp, Artificial Sequence
  primer
gaaaggcaagtgttgcaaagg

SEQ ID NO: 108358 - DNA, 21 bp, Artificial Sequence
  primer
tcctgcctagctctcctgaag

SEQ ID NO: 108359 - DNA, 21 bp, Artificial Sequence
  primer
agaatctccagggtgaagtgg

SEQ ID NO: 108360 - DNA, 18 bp, Artificial Sequence
  primer
gggactcgcctggaactc

SEQ ID NO: 108361 - DNA, 38 bp, Artificial Sequence
  primer
gtaaaacgacggccagtgaaacaatggaagggagggac

SEQ ID NO: 108362 - DNA, 21 bp, Artificial Sequence
  primer
gtggataaaggtgtggtgctg

SEQ ID NO: 108363 - DNA, 20 bp, Artificial Sequence
  primer
gactcgagctcctgttcctg

SEQ ID NO: 108364 - DNA, 38 bp, Artificial Sequence
  primer
gtaaaacgacggccagttctacagagcacctcttgccc

SEQ ID NO: 108365 - DNA, 21 bp, Artificial Sequence
  primer
gcactattctccaccacaagc

SEQ ID NO: 108366 - DNA, 38 bp, Artificial Sequence
  primer
gtaaaacgacggccagtgtgagcagagcatagggatgg

SEQ ID NO: 108367 - DNA, 21 bp, Artificial Sequence
  primer
ctaggcagggatatagcaggc

SEQ ID NO: 108368 - DNA, 38 bp, Artificial Sequence
  primer
gtaaaacgacggccagtgactgggatggattgtgtgtg

SEQ ID NO: 108369 - DNA, 21 bp, Artificial Sequence
  primer
catcctccatgaaacaaagcc

SEQ ID NO: 108370 - DNA, 20 bp, Artificial Sequence
  primer
atgatggtgcctgtgtcctc

SEQ ID NO: 108371 - DNA, 21 bp, Artificial Sequence
  primer
acagcctctgtcagcataacc

SEQ ID NO: 108372 - DNA, 38 bp, Artificial Sequence
  primer
gtaaaacgacggccagtgtagctagggcatgtgcttgg

SEQ ID NO: 108373 - DNA, 37 bp, Artificial Sequence
  primer
gtaaaacgacggccagtaacaggacacttgcgctctg

SEQ ID NO: 108374 - DNA, 21 bp, Artificial Sequence
  primer
cacaagaccagatagccaccc

SEQ ID NO: 108375 - DNA, 22 bp, Artificial Sequence
  primer
tggcttagcatcacaggtgtag

SEQ ID NO: 108376 - DNA, 24 bp, Artificial Sequence
  primer
cttcaaattctaaatgtgtggctg

SEQ ID NO: 108377 - DNA, 38 bp, Artificial Sequence
  primer
gtaaaacgacggccagtgtggcacagattaggcattca

SEQ ID NO: 108378 - DNA, 21 bp, Artificial Sequence
  primer
ggctaaacagggagttgatgc

SEQ ID NO: 108379 - DNA, 19 bp, Artificial Sequence
  primer
gggacgaaggatcaggagc

SEQ ID NO: 108380 - DNA, 23 bp, Artificial Sequence
  primer
catgtcagagaatctccaggact

SEQ ID NO: 108381 - DNA, 44 bp, Artificial Sequence
  primer
gtaaaacgacggccagttcagatttactaagcaatccacatttc

SEQ ID NO: 108382 - DNA, 41 bp, Artificial Sequence
  primer
gtaaaacgacggccagtaacctcttaaatcaatgtgccatc

SEQ ID NO: 108383 - DNA, 38 bp, Artificial Sequence
  primer
gtaaaacgacggccagtcacaggcaactagacagcagg

SEQ ID NO: 108384 - DNA, 20 bp, Artificial Sequence
  primer
atggtacatcagcacagccc

SEQ ID NO: 108385 - DNA, 38 bp, Artificial Sequence
  primer
gtaaaacgacggccagtacacgccaatcagttcagatg

SEQ ID NO: 108386 - DNA, 38 bp, Artificial Sequence
  primer
gtaaaacgacggccagttccaaagcagtggaaattcag

SEQ ID NO: 108387 - DNA, 21 bp, Artificial Sequence
  primer
acacgccaatcagttcagatg

SEQ ID NO: 108388 - DNA, 38 bp, Artificial Sequence
  primer
gtaaaacgacggccagtatacaggtctgcgtcacgatg

SEQ ID NO: 108389 - DNA, 20 bp, Artificial Sequence
  primer
cacagctaggtgggaacagg

SEQ ID NO: 108390 - DNA, 42 bp, Artificial Sequence
  primer
gtaaaacgacggccagtcagtggatgactaactcaagctgat

SEQ ID NO: 108391 - DNA, 38 bp, Artificial Sequence
  primer
gtaaaacgacggccagtattacacatgccttccgtgtg

SEQ ID NO: 108392 - DNA, 38 bp, Artificial Sequence
  primer
gtaaaacgacggccagtacgtgaaacatagcaaccacg

SEQ ID NO: 108393 - DNA, 19 bp, Artificial Sequence
  primer
caaatgcacggatgcaaag

SEQ ID NO: 108394 - DNA, 45 bp, Artificial Sequence
  primer
gtaaaacgacggccagttggtcacaatatcactagaactgaattt

SEQ ID NO: 108395 - DNA, 21 bp, Artificial Sequence
  primer
gctgaaagatgaagcggactc

SEQ ID NO: 108396 - DNA, 39 bp, Artificial Sequence
  primer
gtaaaacgacggccagttcagaatcagagtcactgtcgc

SEQ ID NO: 108397 - DNA, 38 bp, Artificial Sequence
  primer
gtaaaacgacggccagttgcaagggtttctgtgtgttc

SEQ ID NO: 108398 - DNA, 22 bp, Artificial Sequence
  primer
tgagggtcgagcaatattaacc

SEQ ID NO: 108399 - DNA, 38 bp, Artificial Sequence
  primer
gtaaaacgacggccagtcctttgaatcccaactggttc

SEQ ID NO: 108400 - DNA, 38 bp, Artificial Sequence
  primer
gtaaaacgacggccagttctggcatattcatcctcagc

SEQ ID NO: 108401 - DNA, 21 bp, Artificial Sequence
  primer
tgtaatgaggtccgtggtgtc

SEQ ID NO: 108402 - DNA, 38 bp, Artificial Sequence
  primer
gtaaaacgacggccagtaagtgatccaggtcccaaatc

SEQ ID NO: 108403 - DNA, 21 bp, Artificial Sequence
  primer
ctgcccatggattatatggtg

SEQ ID NO: 108404 - DNA, 21 bp, Artificial Sequence
  primer
attgctagcattgcttggagc

SEQ ID NO: 108405 - DNA, 21 bp, Artificial Sequence
  primer
ggagactgtttaggtggaggc

SEQ ID NO: 108406 - DNA, 39 bp, Artificial Sequence
  primer
gtaaaacgacggccagtggtttgtgaagtggagcaagac

SEQ ID NO: 108407 - DNA, 43 bp, Artificial Sequence
  primer
gtaaaacgacggccagtaagaattaatgcagagccttagaatg

SEQ ID NO: 108408 - DNA, 42 bp, Artificial Sequence
  primer
gtaaaacgacggccagtaacatatgaagaacccaagtgtgac

SEQ ID NO: 108409 - DNA, 39 bp, Artificial Sequence
  primer
gtaaaacgacggccagtcccaactaaagaataccagggc

SEQ ID NO: 108410 - DNA, 21 bp, Artificial Sequence
  primer
accctcatcttgatggcattc

SEQ ID NO: 108411 - DNA, 21 bp, Artificial Sequence
  primer
attcacacaactcatctggcg

SEQ ID NO: 108412 - DNA, 21 bp, Artificial Sequence
  primer
ccttctctaggaacagctggg

SEQ ID NO: 108413 - DNA, 40 bp, Artificial Sequence
  primer
gtaaaacgacggccagtgctactggaacagagagagacgc

SEQ ID NO: 108414 - DNA, 38 bp, Artificial Sequence
  primer
gtaaaacgacggccagtttgctgtagatgcagttgtgc

SEQ ID NO: 108415 - DNA, 43 bp, Artificial Sequence
  primer
gtaaaacgacggccagtttagttccagaacacgagttaatttc

SEQ ID NO: 108416 - DNA, 42 bp, Artificial Sequence
  primer
gtaaaacgacggccagttgtcagacaccagaaggtacaataa

SEQ ID NO: 108417 - DNA, 27 bp, Artificial Sequence
  primer
ggtatgtaattaccagaacagctggat

SEQ ID NO: 108418 - DNA, 38 bp, Artificial Sequence
  primer
gtaaaacgacggccagtcactgggaggctaaagcagac

SEQ ID NO: 108419 - DNA, 38 bp, Artificial Sequence
  primer
gtaaaacgacggccagtggaccacaagaggtccacata

SEQ ID NO: 108420 - DNA, 38 bp, Artificial Sequence
  primer
gtaaaacgacggccagttttccttagtcacagcccaaa

SEQ ID NO: 108421 - DNA, 21 bp, Artificial Sequence
  primer
tacccacccgagttacaacag

SEQ ID NO: 108422 - DNA, 21 bp, Artificial Sequence
  primer
agctacagcttcagaggaggg

SEQ ID NO: 108423 - DNA, 21 bp, Artificial Sequence
  primer
gggcattgaacaaatgaacac

SEQ ID NO: 108424 - DNA, 21 bp, Artificial Sequence
  primer
acccaacagaatcctggtcac

SEQ ID NO: 108425 - DNA, 38 bp, Artificial Sequence
  primer
gtaaaacgacggccagtgacctaaatcgaggatgcctg

SEQ ID NO: 108426 - DNA, 38 bp, Artificial Sequence
  primer
gtaaaacgacggccagtggcagaaaccaaagttcaagg

SEQ ID NO: 108427 - DNA, 38 bp, Artificial Sequence
  primer
gtaaaacgacggccagtagaaaccgcatactctggctg

SEQ ID NO: 108428 - DNA, 38 bp, Artificial Sequence
  primer
gtaaaacgacggccagttgtgaaaccacctaaagcagg

SEQ ID NO: 108429 - DNA, 24 bp, Artificial Sequence
  primer
tcctggacagtaatgatattcagc

SEQ ID NO: 108430 - DNA, 21 bp, Artificial Sequence
  primer
tccttgaaacctttcctgacc

SEQ ID NO: 108431 - DNA, 22 bp, Artificial Sequence
  primer
cccagtatccaagctgctaaag

SEQ ID NO: 108432 - DNA, 38 bp, Artificial Sequence
  primer
gtaaaacgacggccagttccttggcagcttaggtatgg

SEQ ID NO: 108433 - DNA, 20 bp, Artificial Sequence
  primer
gggcctcaagagttgagctg

SEQ ID NO: 108434 - DNA, 20 bp, Artificial Sequence
  primer
gggaaaggaagcctgaagac

SEQ ID NO: 108435 - DNA, 24 bp, Artificial Sequence
  primer
tcttgcataagctccttattggtc

SEQ ID NO: 108436 - DNA, 18 bp, Artificial Sequence
  primer
ggccagccactcccatag

SEQ ID NO: 108437 - DNA, 21 bp, Artificial Sequence
  primer
gcttactggtggaaggaatcg

SEQ ID NO: 108438 - DNA, 20 bp, Artificial Sequence
  primer
gaggcagaccagaccaactg

SEQ ID NO: 108439 - DNA, 21 bp, Artificial Sequence
  primer
gagagcttctctgggcgatag

SEQ ID NO: 108440 - DNA, 21 bp, Artificial Sequence
  primer
tagaggtggtaggcatggagg

SEQ ID NO: 108441 - DNA, 21 bp, Artificial Sequence
  primer
tggcaacatgaaacacagttg

SEQ ID NO: 108442 - DNA, 21 bp, Artificial Sequence
  primer
cagctctgggacaacacaatc

SEQ ID NO: 108443 - DNA, 21 bp, Artificial Sequence
  primer
agagctttaccttcggagctg

SEQ ID NO: 108444 - DNA, 21 bp, Artificial Sequence
  primer
tttgggaacactggccttaac

SEQ ID NO: 108445 - DNA, 20 bp, Artificial Sequence
  primer
ctttggctcttcccacttcc

SEQ ID NO: 108446 - DNA, 21 bp, Artificial Sequence
  primer
tggaccctctgtgttaaaggg

SEQ ID NO: 108447 - DNA, 21 bp, Artificial Sequence
  primer
ggtggtcatgctcacattctg

SEQ ID NO: 108448 - DNA, 21 bp, Artificial Sequence
  primer
tcccagcaggcaaagagtaag

SEQ ID NO: 108449 - DNA, 38 bp, Artificial Sequence
  primer
gtaaaacgacggccagttcatagcctggttcagtccag

SEQ ID NO: 108450 - DNA, 38 bp, Artificial Sequence
  primer
gtaaaacgacggccagttagctgtcatttcctggtccc

SEQ ID NO: 108451 - DNA, 21 bp, Artificial Sequence
  primer
ctttccactgcagagcagtcc

SEQ ID NO: 108452 - DNA, 37 bp, Artificial Sequence
  primer
gtaaaacgacggccagtgctgagcctggaacctgtag

SEQ ID NO: 108453 - DNA, 21 bp, Artificial Sequence
  primer
cagtgtgtaacaggagcccag

SEQ ID NO: 108454 - DNA, 38 bp, Artificial Sequence
  primer
gtaaaacgacggccagtggaaataggtctcgctgaagg

SEQ ID NO: 108455 - DNA, 38 bp, Artificial Sequence
  primer
gtaaaacgacggccagttcagaatactgcgttatgggc

SEQ ID NO: 108456 - DNA, 21 bp, Artificial Sequence
  primer
agatggttcatcattctgccc

SEQ ID NO: 108457 - DNA, 21 bp, Artificial Sequence
  primer
ctcattgcagttgtcacaccc

SEQ ID NO: 108458 - DNA, 22 bp, Artificial Sequence
  primer
cagctcaccacagacgtgtatc

SEQ ID NO: 108459 - DNA, 37 bp, Artificial Sequence
  primer
gtaaaacgacggccagtgcccagaacagaaatcatgg

SEQ ID NO: 108460 - DNA, 38 bp, Artificial Sequence
  primer
gtaaaacgacggccagtcccaatcccacctggtttatc

SEQ ID NO: 108461 - DNA, 21 bp, Artificial Sequence
  primer
cttgactgttgatgacgccac

SEQ ID NO: 108462 - DNA, 38 bp, Artificial Sequence
  primer
gtaaaacgacggccagtcagccttccataccctctgtc

SEQ ID NO: 108463 - DNA, 21 bp, Artificial Sequence
  primer
tctagccctttctggctcttg

SEQ ID NO: 108464 - DNA, 21 bp, Artificial Sequence
  primer
tagtggctgtttggtgactgg

SEQ ID NO: 108465 - DNA, 38 bp, Artificial Sequence
  primer
gtaaaacgacggccagttctgcatggaatggaaggaac

SEQ ID NO: 108466 - DNA, 21 bp, Artificial Sequence
  primer
cccagacaacaaatctgtccc

SEQ ID NO: 108467 - DNA, 20 bp, Artificial Sequence
  primer
gaagggaggtccatctgtcc

SEQ ID NO: 108468 - DNA, 38 bp, Artificial Sequence
  primer
gtaaaacgacggccagtaggaaggaagggatgaatgtg

SEQ ID NO: 108469 - DNA, 38 bp, Artificial Sequence
  primer
gtaaaacgacggccagtagctcgtccagcttgtaccac

SEQ ID NO: 108470 - DNA, 21 bp, Artificial Sequence
  primer
ggagaaccggagaaacagatg

SEQ ID NO: 108471 - DNA, 38 bp, Artificial Sequence
  primer
gtaaaacgacggccagtcacagttgatgagcctcttgc

SEQ ID NO: 108472 - DNA, 37 bp, Artificial Sequence
  primer
gtaaaacgacggccagtgggtactgcatcttgaagcc

SEQ ID NO: 108473 - DNA, 40 bp, Artificial Sequence
  primer
gtaaaacgacggccagttcagtggtggactaagcagtttc

SEQ ID NO: 108474 - DNA, 21 bp, Artificial Sequence
  primer
gtcataatgaagaggcctggg

SEQ ID NO: 108475 - DNA, 21 bp, Artificial Sequence
  primer
ggactgccagacagacacaag

SEQ ID NO: 108476 - DNA, 37 bp, Artificial Sequence
  primer
gtaaaacgacggccagtccagacacttgcccaggtag

SEQ ID NO: 108477 - DNA, 21 bp, Artificial Sequence
  primer
tatgctagggacgtggagatg

SEQ ID NO: 108478 - DNA, 21 bp, Artificial Sequence
  primer
gtgctttactcccaaagcagg

SEQ ID NO: 108479 - DNA, 38 bp, Artificial Sequence
  primer
gtaaaacgacggccagtagtccttcaccacagcgtgtc

SEQ ID NO: 108480 - DNA, 38 bp, Artificial Sequence
  primer
gtaaaacgacggccagtgatctggtttagcaccaaggg

SEQ ID NO: 108481 - DNA, 21 bp, Artificial Sequence
  primer
gatgtgggatagcaccaaagg

SEQ ID NO: 108482 - DNA, 21 bp, Artificial Sequence
  primer
agcaattggatttggaggaac

SEQ ID NO: 108483 - DNA, 38 bp, Artificial Sequence
  primer
gtaaaacgacggccagttgacaacatgaactgtgctgg

SEQ ID NO: 108484 - DNA, 38 bp, Artificial Sequence
  primer
gtaaaacgacggccagtcaagtgtcagctgtctcccag

SEQ ID NO: 108485 - DNA, 38 bp, Artificial Sequence
  primer
gtaaaacgacggccagtgctaaggcatcactgcacaag

SEQ ID NO: 108486 - DNA, 40 bp, Artificial Sequence
  primer
gtaaaacgacggccagtactccaaatatacccaagtgcag

SEQ ID NO: 108487 - DNA, 22 bp, Artificial Sequence
  primer
tttcagcttctgggacattagc

SEQ ID NO: 108488 - DNA, 39 bp, Artificial Sequence
  primer
gtaaaacgacggccagttgatggagtgtgaagaatgtgg

SEQ ID NO: 108489 - DNA, 21 bp, Artificial Sequence
  primer
tggctctccctgtaagtttgg

SEQ ID NO: 108490 - DNA, 38 bp, Artificial Sequence
  primer
gtaaaacgacggccagtgcaacatcttcctcaatttgg

SEQ ID NO: 108491 - DNA, 21 bp, Artificial Sequence
  primer
ggtttctgttgtattgtgccc

SEQ ID NO: 108492 - DNA, 38 bp, Artificial Sequence
  primer
gtaaaacgacggccagtttgcataatggacctcgtttg

SEQ ID NO: 108493 - DNA, 38 bp, Artificial Sequence
  primer
gtaaaacgacggccagtctctgatgcatgagttgctcc

SEQ ID NO: 108494 - DNA, 38 bp, Artificial Sequence
  primer
gtaaaacgacggccagttgactccggtaagggtgtttc

SEQ ID NO: 108495 - DNA, 27 bp, Artificial Sequence
  primer
ttgtagggttagtaaagaagttcatgg

SEQ ID NO: 108496 - DNA, 38 bp, Artificial Sequence
  primer
gtaaaacgacggccagttttccacttgagcgggtttac

SEQ ID NO: 108497 - DNA, 38 bp, Artificial Sequence
  primer
gtaaaacgacggccagtaatcacggcgtttgttcttag

SEQ ID NO: 108498 - DNA, 20 bp, Artificial Sequence
  primer
ctgcagtgaggtgtgattgc

SEQ ID NO: 108499 - DNA, 43 bp, Artificial Sequence
  primer
gtaaaacgacggccagttccacaatactcaaatcctattctcc

SEQ ID NO: 108500 - DNA, 37 bp, Artificial Sequence
  primer
gtaaaacgacggccagtagggacaattggaatttggg

SEQ ID NO: 108501 - DNA, 39 bp, Artificial Sequence
  primer
gtaaaacgacggccagtgagcattgcttgagcttaggag

SEQ ID NO: 108502 - DNA, 22 bp, Artificial Sequence
  primer
tgcatttaatgaagacctgcac

SEQ ID NO: 108503 - DNA, 21 bp, Artificial Sequence
  primer
aaataaggcaaggcaaagtcc

SEQ ID NO: 108504 - DNA, 38 bp, Artificial Sequence
  primer
gtaaaacgacggccagtcattggagaagaggcaaggtc

SEQ ID NO: 108505 - DNA, 38 bp, Artificial Sequence
  primer
gtaaaacgacggccagtctcaacaggagtggtagcgtg

SEQ ID NO: 108506 - DNA, 22 bp, Artificial Sequence
  primer
caacgtgtgtgagagcataagg

SEQ ID NO: 108507 - DNA, 41 bp, Artificial Sequence
  primer
gtaaaacgacggccagtagtcacagttaagaatacccaccc

SEQ ID NO: 108508 - DNA, 21 bp, Artificial Sequence
  primer
tacaggtgtgagccactgtcc

SEQ ID NO: 108509 - DNA, 38 bp, Artificial Sequence
  primer
gtaaaacgacggccagtagcacgttagagaaactcccg

SEQ ID NO: 108510 - DNA, 21 bp, Artificial Sequence
  primer
ctaggcgtaggtatgcggact

SEQ ID NO: 108511 - DNA, 40 bp, Artificial Sequence
  primer
gtaaaacgacggccagtaagcaacagtgaaatgcaaagac

SEQ ID NO: 108512 - DNA, 21 bp, Artificial Sequence
  primer
accctctgccttcagtttgac

SEQ ID NO: 108513 - DNA, 21 bp, Artificial Sequence
  primer
tcagcagaaggttgctgagac

SEQ ID NO: 108514 - DNA, 21 bp, Artificial Sequence
  primer
aaatttgagcgcagaaaggac

SEQ ID NO: 108515 - DNA, 38 bp, Artificial Sequence
  primer
gtaaaacgacggccagtggctctgaaccagcttctgtc

SEQ ID NO: 108516 - DNA, 37 bp, Artificial Sequence
  primer
gtaaaacgacggccagtctttagtcccagctcgaggg

SEQ ID NO: 108517 - DNA, 21 bp, Artificial Sequence
  primer
ccatgaggtacatttcagccc

SEQ ID NO: 108518 - DNA, 21 bp, Artificial Sequence
  primer
ctacagccaccagttgtgacg

SEQ ID NO: 108519 - DNA, 21 bp, Artificial Sequence
  primer
cccagaaagcagcactcaaac

SEQ ID NO: 108520 - DNA, 37 bp, Artificial Sequence
  primer
gtaaaacgacggccagtgtccctcctccaagtctccc

SEQ ID NO: 108521 - DNA, 21 bp, Artificial Sequence
  primer
gggaaagatgagccctagatg

SEQ ID NO: 108522 - DNA, 37 bp, Artificial Sequence
  primer
gtaaaacgacggccagtatctgggcctggaaccatac

SEQ ID NO: 108523 - DNA, 38 bp, Artificial Sequence
  primer
gtaaaacgacggccagtctttggtttctgcagtccctg

SEQ ID NO: 108524 - DNA, 38 bp, Artificial Sequence
  primer
gtaaaacgacggccagtcagcacagaattccctcaacc

SEQ ID NO: 108525 - DNA, 21 bp, Artificial Sequence
  primer
gcatgcaactcttccaaacag

SEQ ID NO: 108526 - DNA, 37 bp, Artificial Sequence
  primer
gtaaaacgacggccagttcatggttggatcctcttgc

SEQ ID NO: 108527 - DNA, 38 bp, Artificial Sequence
  primer
gtaaaacgacggccagtgaggagcaggaattcacacac

SEQ ID NO: 108528 - DNA, 21 bp, Artificial Sequence
  primer
tcccttccttcccacatacac

SEQ ID NO: 108529 - DNA, 21 bp, Artificial Sequence
  primer
gcccagccaataattcatttc

SEQ ID NO: 108530 - DNA, 21 bp, Artificial Sequence
  primer
acacagggcatagctttggag

SEQ ID NO: 108531 - DNA, 38 bp, Artificial Sequence
  primer
gtaaaacgacggccagtctgaatttgcaatgatttggg

SEQ ID NO: 108532 - DNA, 36 bp, Artificial Sequence
  primer
gtaaaacgacggccagtactggcaggattcgaggag

SEQ ID NO: 108533 - DNA, 21 bp, Artificial Sequence
  primer
ctgtcagcattgacgaggaag

SEQ ID NO: 108534 - DNA, 20 bp, Artificial Sequence
  primer
cgctattccagcacacacac

SEQ ID NO: 108535 - DNA, 37 bp, Artificial Sequence
  primer
gtaaaacgacggccagtcaagagggcatcttccacac

SEQ ID NO: 108536 - DNA, 21 bp, Artificial Sequence
  primer
tgtacgcaatccctgaagatg

SEQ ID NO: 108537 - DNA, 21 bp, Artificial Sequence
  primer
acctcatgaagtgggtgtgtg

SEQ ID NO: 108538 - DNA, 21 bp, Artificial Sequence
  primer
gaggcgaaatctctcatgttg

SEQ ID NO: 108539 - DNA, 21 bp, Artificial Sequence
  primer
tgttgatcccactaagccctc

SEQ ID NO: 108540 - DNA, 21 bp, Artificial Sequence
  primer
ctcacatttcccatctggagc

SEQ ID NO: 108541 - DNA, 21 bp, Artificial Sequence
  primer
aaacatcccagtttaccgtgg

SEQ ID NO: 108542 - DNA, 38 bp, Artificial Sequence
  primer
gtaaaacgacggccagtctcagaactcctccttccagc

SEQ ID NO: 108543 - DNA, 37 bp, Artificial Sequence
  primer
gtaaaacgacggccagtctcactgtgaagtggctccc

SEQ ID NO: 108544 - DNA, 38 bp, Artificial Sequence
  primer
gtaaaacgacggccagtgcctccaagtgagaaaccaag

SEQ ID NO: 108545 - DNA, 38 bp, Artificial Sequence
  primer
gtaaaacgacggccagtctagacagcagacacaggccc

SEQ ID NO: 108546 - DNA, 21 bp, Artificial Sequence
  primer
aggaaatgcaaggaaatgacc

SEQ ID NO: 108547 - DNA, 19 bp, Artificial Sequence
  primer
cctcgggaaccatcgctac

SEQ ID NO: 108548 - DNA, 21 bp, Artificial Sequence
  primer
ccaacatttacaaaggccagc

SEQ ID NO: 108549 - DNA, 21 bp, Artificial Sequence
  primer
agtccctctccaagcagtgag

SEQ ID NO: 108550 - DNA, 21 bp, Artificial Sequence
  primer
ccttccagatcaggagtggac

SEQ ID NO: 108551 - DNA, 38 bp, Artificial Sequence
  primer
gtaaaacgacggccagttgtgccacagggtaagtcttc

SEQ ID NO: 108552 - DNA, 38 bp, Artificial Sequence
  primer
gtaaaacgacggccagtaagaaagtcgcctgctgaaac

SEQ ID NO: 108553 - DNA, 23 bp, Artificial Sequence
  primer
gcgaaatgctggctaatttattc

SEQ ID NO: 108554 - DNA, 38 bp, Artificial Sequence
  primer
gtaaaacgacggccagtggctttaagtgactgttgccc

SEQ ID NO: 108555 - DNA, 21 bp, Artificial Sequence
  primer
tacagaagctggaatcctccc

SEQ ID NO: 108556 - DNA, 21 bp, Artificial Sequence
  primer
ttgaagtggcagaaagtgtgg

SEQ ID NO: 108557 - DNA, 21 bp, Artificial Sequence
  primer
gaggtgaggagtgtgggagac

SEQ ID NO: 108558 - DNA, 38 bp, Artificial Sequence
  primer
gtaaaacgacggccagttcactgtgcctctaatggagc

SEQ ID NO: 108559 - DNA, 40 bp, Artificial Sequence
  primer
gtaaaacgacggccagtgagatggaacttcttgaaccaaa

SEQ ID NO: 108560 - DNA, 22 bp, Artificial Sequence
  primer
tgtccagaaagaacttggcttc

SEQ ID NO: 108561 - DNA, 22 bp, Artificial Sequence
  primer
aaacggtgaccacagaaatagc

SEQ ID NO: 108562 - DNA, 21 bp, Artificial Sequence
  primer
caaccttagccctgaaagcac

SEQ ID NO: 108563 - DNA, 39 bp, Artificial Sequence
  primer
gtaaaacgacggccagtaagacacaccaataaccaaggg

SEQ ID NO: 108564 - DNA, 21 bp, Artificial Sequence
  primer
atctggaatcttctgttgggc

SEQ ID NO: 108565 - DNA, 42 bp, Artificial Sequence
  primer
gtaaaacgacggccagtaacttccactgacattactgagagg

SEQ ID NO: 108566 - DNA, 19 bp, Artificial Sequence
  primer
acttcctcagctggaaggg

SEQ ID NO: 108567 - DNA, 21 bp, Artificial Sequence
  primer
gtggctaagcgagactctgtc

SEQ ID NO: 108568 - DNA, 23 bp, Artificial Sequence
  primer
tcaacaagattgaaagggaatgt

SEQ ID NO: 108569 - DNA, 41 bp, Artificial Sequence
  primer
gtaaaacgacggccagtttcaagaaaccatcctttgtgatt

SEQ ID NO: 108570 - DNA, 36 bp, Artificial Sequence
  primer
gtaaaacgacggccagtatcccacacgctcaaggtc

SEQ ID NO: 108571 - DNA, 21 bp, Artificial Sequence
  primer
aggaaagctgaagattccacc

SEQ ID NO: 108572 - DNA, 37 bp, Artificial Sequence
  primer
gtaaaacgacggccagtctcatcacaaccctgccatc

SEQ ID NO: 108573 - DNA, 21 bp, Artificial Sequence
  primer
catggctccttagttccaagc

SEQ ID NO: 108574 - DNA, 38 bp, Artificial Sequence
  primer
gtaaaacgacggccagtcaggaacacagggaaagcatc

SEQ ID NO: 108575 - DNA, 38 bp, Artificial Sequence
  primer
gtaaaacgacggccagtatctgcagacaaggaaggctc

SEQ ID NO: 108576 - DNA, 21 bp, Artificial Sequence
  primer
cagagctagagcctggtctcc

SEQ ID NO: 108577 - DNA, 21 bp, Artificial Sequence
  primer
cccagatgatgcctaaacaag

SEQ ID NO: 108578 - DNA, 21 bp, Artificial Sequence
  primer
tttaaatcaggactgcccaac

SEQ ID NO: 108579 - DNA, 21 bp, Artificial Sequence
  primer
ttggctgaaggaaaggaagag

SEQ ID NO: 108580 - DNA, 23 bp, Artificial Sequence
  primer
tcctcactgcatagtctattggg

SEQ ID NO: 108581 - DNA, 21 bp, Artificial Sequence
  primer
ctagagctagtgatcccgccc

SEQ ID NO: 108582 - DNA, 21 bp, Artificial Sequence
  primer
agactgtcaaaggcttggtcc

SEQ ID NO: 108583 - DNA, 20 bp, Artificial Sequence
  primer
aaacaaagacgcacacctgc

SEQ ID NO: 108584 - DNA, 38 bp, Artificial Sequence
  primer
gtaaaacgacggccagttcgtagccagaaatcacttcg

SEQ ID NO: 108585 - DNA, 21 bp, Artificial Sequence
  primer
tgtgttgagagcctgttgtgc

SEQ ID NO: 108586 - DNA, 20 bp, Artificial Sequence
  primer
acctctgcagacgggagaac

SEQ ID NO: 108587 - DNA, 38 bp, Artificial Sequence
  primer
gtaaaacgacggccagtgcaaaggctgcaatactggac

SEQ ID NO: 108588 - DNA, 21 bp, Artificial Sequence
  primer
ttcccacaatgatgaaactgc

SEQ ID NO: 108589 - DNA, 20 bp, Artificial Sequence
  primer
agcctaagcgacagggtgag

SEQ ID NO: 108590 - DNA, 21 bp, Artificial Sequence
  primer
tactctgccagatggaaaggg

SEQ ID NO: 108591 - DNA, 21 bp, Artificial Sequence
  primer
gagggcatctgaaggttgaag

SEQ ID NO: 108592 - DNA, 21 bp, Artificial Sequence
  primer
cagcgaggacctcatttaacc

SEQ ID NO: 108593 - DNA, 19 bp, Artificial Sequence
  primer
ggcggaagcattctagacg

SEQ ID NO: 108594 - DNA, 38 bp, Artificial Sequence
  primer
gtaaaacgacggccagtctgtggtaaagcaatcctccc

SEQ ID NO: 108595 - DNA, 21 bp, Artificial Sequence
  primer
tatccacagaggaagggcttg

SEQ ID NO: 108596 - DNA, 21 bp, Artificial Sequence
  primer
agcgtctcgtagcggttagac

SEQ ID NO: 108597 - DNA, 36 bp, Artificial Sequence
  primer
gtaaaacgacggccagtcggctgggactacaggaac

SEQ ID NO: 108598 - DNA, 38 bp, Artificial Sequence
  primer
gtaaaacgacggccagtaagaggcttggtataggccac

SEQ ID NO: 108599 - DNA, 21 bp, Artificial Sequence
  primer
gacctggtgacatggaggaag

SEQ ID NO: 108600 - DNA, 40 bp, Artificial Sequence
  primer
gtaaaacgacggccagtcactgcaaccaaaccaattaaac

SEQ ID NO: 108601 - DNA, 38 bp, Artificial Sequence
  primer
gtaaaacgacggccagtgcctaattgaacgaatccagc

SEQ ID NO: 108602 - DNA, 21 bp, Artificial Sequence
  primer
cccacatggcaaatctaatcc

SEQ ID NO: 108603 - DNA, 20 bp, Artificial Sequence
  primer
cactaaagaacccgccaaag

SEQ ID NO: 108604 - DNA, 37 bp, Artificial Sequence
  primer
gtaaaacgacggccagtgtccttagctctccggttgc

SEQ ID NO: 108605 - DNA, 38 bp, Artificial Sequence
  primer
gtaaaacgacggccagtacttcacgatgccttccagtc

SEQ ID NO: 108606 - DNA, 20 bp, Artificial Sequence
  primer
catggctggctgcttgttag

SEQ ID NO: 108607 - DNA, 19 bp, Artificial Sequence
  primer
ctgttggtggcaccttacg

SEQ ID NO: 108608 - DNA, 23 bp, Artificial Sequence
  primer
gcagccaatattctcaagagttc

SEQ ID NO: 108609 - DNA, 21 bp, Artificial Sequence
  primer
tctgccttagggcaaactctc

SEQ ID NO: 108610 - DNA, 21 bp, Artificial Sequence
  primer
atgattctgactgaggcaggg

SEQ ID NO: 108611 - DNA, 21 bp, Artificial Sequence
  primer
cctgctttactccctaccacg

SEQ ID NO: 108612 - DNA, 37 bp, Artificial Sequence
  primer
gtaaaacgacggccagtcagggatgtgtagggcacag

SEQ ID NO: 108613 - DNA, 21 bp, Artificial Sequence
  primer
ccaagcctcactatgtttggg

SEQ ID NO: 108614 - DNA, 38 bp, Artificial Sequence
  primer
gtaaaacgacggccagtgtagggcagtggagatggaag

SEQ ID NO: 108615 - DNA, 21 bp, Artificial Sequence
  primer
catctggaaaggtgactacgg

SEQ ID NO: 108616 - DNA, 38 bp, Artificial Sequence
  primer
gtaaaacgacggccagtaggccctgccattctattctc

SEQ ID NO: 108617 - DNA, 36 bp, Artificial Sequence
  primer
gtaaaacgacggccagtctgatggaatccacctgcc

SEQ ID NO: 108618 - DNA, 21 bp, Artificial Sequence
  primer
gtgggtccatgttctttcctg

SEQ ID NO: 108619 - DNA, 23 bp, Artificial Sequence
  primer
gactgtggctatacaactctgcg

SEQ ID NO: 108620 - DNA, 21 bp, Artificial Sequence
  primer
tctgttggtttctttgtgccc

SEQ ID NO: 108621 - DNA, 21 bp, Artificial Sequence
  primer
aggacccatgtgtgttcagtg

SEQ ID NO: 108622 - DNA, 20 bp, Artificial Sequence
  primer
gccagccatgatgatctacc

SEQ ID NO: 108623 - DNA, 37 bp, Artificial Sequence
  primer
gtaaaacgacggccagtccttggtggtgatatgtgcc

SEQ ID NO: 108624 - DNA, 37 bp, Artificial Sequence
  primer
gtaaaacgacggccagtggaaagaacggatctccctg

SEQ ID NO: 108625 - DNA, 38 bp, Artificial Sequence
  primer
gtaaaacgacggccagtggccatggttacagagattcc

SEQ ID NO: 108626 - DNA, 21 bp, Artificial Sequence
  primer
ctgcaggctgtgtgaggttag

SEQ ID NO: 108627 - DNA, 21 bp, Artificial Sequence
  primer
aatacccaggcctgatttctg

SEQ ID NO: 108628 - DNA, 38 bp, Artificial Sequence
  primer
gtaaaacgacggccagtttctttcccagctccattcag

SEQ ID NO: 108629 - DNA, 38 bp, Artificial Sequence
  primer
gtaaaacgacggccagtactgggcctagtttggaggag

SEQ ID NO: 108630 - DNA, 21 bp, Artificial Sequence
  primer
ggcctgaagtatccactggtc

SEQ ID NO: 108631 - DNA, 21 bp, Artificial Sequence
  primer
tacaggtagagctgcagtgcc

SEQ ID NO: 108632 - DNA, 21 bp, Artificial Sequence
  primer
gaagcaaacgctctaaggtgg

SEQ ID NO: 108633 - DNA, 21 bp, Artificial Sequence
  primer
gagcctcaatatctgcttggg

SEQ ID NO: 108634 - DNA, 22 bp, Artificial Sequence
  primer
tgtccaaagctttaaccttccc

SEQ ID NO: 108635 - DNA, 21 bp, Artificial Sequence
  primer
ttgtcttcccttctctgagcc

SEQ ID NO: 108636 - DNA, 21 bp, Artificial Sequence
  primer
acgtttctggctgaactctgg

SEQ ID NO: 108637 - DNA, 21 bp, Artificial Sequence
  primer
atctttgtacttgccgtgtgg

SEQ ID NO: 108638 - DNA, 21 bp, Artificial Sequence
  primer
tccagttggatcctatggcag

SEQ ID NO: 108639 - DNA, 36 bp, Artificial Sequence
  primer
gtaaaacgacggccagtctcaacccaggcttcgttc

SEQ ID NO: 108640 - DNA, 18 bp, Artificial Sequence
  primer
cagagagccgtcgcagag

SEQ ID NO: 108641 - DNA, 38 bp, Artificial Sequence
  primer
gtaaaacgacggccagtcaggagatatgggagacctcg

SEQ ID NO: 108642 - DNA, 20 bp, Artificial Sequence
  primer
gagtcagggattcctccagc

SEQ ID NO: 108643 - DNA, 21 bp, Artificial Sequence
  primer
gtcttagacgcacttcccacc

SEQ ID NO: 108644 - DNA, 21 bp, Artificial Sequence
  primer
gccgtgaagacagctacaatg

SEQ ID NO: 108645 - DNA, 38 bp, Artificial Sequence
  primer
gtaaaacgacggccagtaccagtcaatgtgcagcaaac

SEQ ID NO: 108646 - DNA, 26 bp, Artificial Sequence
  primer
tgcatgcactagctatgtcttaaatc

SEQ ID NO: 108647 - DNA, 42 bp, Artificial Sequence
  primer
gtaaaacgacggccagtcatatattaaaggtgttcactgggc

SEQ ID NO: 108648 - DNA, 38 bp, Artificial Sequence
  primer
gtaaaacgacggccagttcccatcattgcagaaacttg

SEQ ID NO: 108649 - DNA, 41 bp, Artificial Sequence
  primer
gtaaaacgacggccagttgtgttgtcttgtcttcacctttc

SEQ ID NO: 108650 - DNA, 38 bp, Artificial Sequence
  primer
gtaaaacgacggccagtcatctttcttggcatccttcg

SEQ ID NO: 108651 - DNA, 38 bp, Artificial Sequence
  primer
gtaaaacgacggccagtcttatccaaggcctacttgcc

SEQ ID NO: 108652 - DNA, 23 bp, Artificial Sequence
  primer
cacaaattcagctgcagactacc

SEQ ID NO: 108653 - DNA, 38 bp, Artificial Sequence
  primer
gtaaaacgacggccagtttccggagactgtcctctctg

SEQ ID NO: 108654 - DNA, 21 bp, Artificial Sequence
  primer
aacatggattcatcagcaagg

SEQ ID NO: 108655 - DNA, 23 bp, Artificial Sequence
  primer
tttgcaagtaaattggtcctaaa

SEQ ID NO: 108656 - DNA, 21 bp, Artificial Sequence
  primer
cggagtatacttctcgggtga

SEQ ID NO: 108657 - DNA, 21 bp, Artificial Sequence
  primer
aggaatggaaagccaaacact

SEQ ID NO: 108658 - DNA, 41 bp, Artificial Sequence
  primer
gtaaaacgacggccagtgcggtctacttattctgtttccaa

SEQ ID NO: 108659 - DNA, 37 bp, Artificial Sequence
  primer
gtaaaacgacggccagttgaccgatccaacggattac

SEQ ID NO: 108660 - DNA, 21 bp, Artificial Sequence
  primer
acattaggacaagtgggtcgc

SEQ ID NO: 108661 - DNA, 21 bp, Artificial Sequence
  primer
tataagtcccaaacgcacgtc

SEQ ID NO: 108662 - DNA, 21 bp, Artificial Sequence
  primer
gcagatggcagtttctttcac

SEQ ID NO: 108663 - DNA, 23 bp, Artificial Sequence
  primer
tctacaccttggccacatttaag

SEQ ID NO: 108664 - DNA, 41 bp, Artificial Sequence
  primer
gtaaaacgacggccagtcccaactacacagacacacatttc

SEQ ID NO: 108665 - DNA, 23 bp, Artificial Sequence
  primer
tcatgtctgttgaataatggcag

SEQ ID NO: 108666 - DNA, 40 bp, Artificial Sequence
  primer
gtaaaacgacggccagtggcaaagttgaaacactgcatac

SEQ ID NO: 108667 - DNA, 38 bp, Artificial Sequence
  primer
gtaaaacgacggccagttgccttgggaaatactgtgtc

SEQ ID NO: 108668 - DNA, 38 bp, Artificial Sequence
  primer
gtaaaacgacggccagttgtcaagtgaatgggcttcct

SEQ ID NO: 108669 - DNA, 21 bp, Artificial Sequence
  primer
acaggcgatcccactacaaac

SEQ ID NO: 108670 - DNA, 22 bp, Artificial Sequence
  primer
cagaactgccagctcgaataag

SEQ ID NO: 108671 - DNA, 36 bp, Artificial Sequence
  primer
gtaaaacgacggccagtcacagagtggcctgtgctc

SEQ ID NO: 108672 - DNA, 18 bp, Artificial Sequence
  primer
ctcgcccaccacaaagtc

SEQ ID NO: 108673 - DNA, 38 bp, Artificial Sequence
  primer
gtaaaacgacggccagtcttcacggagctgttgaggac

SEQ ID NO: 108674 - DNA, 20 bp, Artificial Sequence
  primer
actcgttgccagtcttcacg

SEQ ID NO: 108675 - DNA, 38 bp, Artificial Sequence
  primer
gtaaaacgacggccagtctgataaggaatgggtgtccc

SEQ ID NO: 108676 - DNA, 38 bp, Artificial Sequence
  primer
gtaaaacgacggccagtacactcgcttcctccaatgtc

SEQ ID NO: 108677 - DNA, 22 bp, Artificial Sequence
  primer
cagaccagaacacctggatctc

SEQ ID NO: 108678 - DNA, 21 bp, Artificial Sequence
  primer
catatttctctgcacccaccc

SEQ ID NO: 108679 - DNA, 20 bp, Artificial Sequence
  primer
accagtccagggtgacacag

SEQ ID NO: 108680 - DNA, 37 bp, Artificial Sequence
  primer
gtaaaacgacggccagttcacaaccatctgccctagc

SEQ ID NO: 108681 - DNA, 38 bp, Artificial Sequence
  primer
gtaaaacgacggccagttgaaacagagaagccagaggg

SEQ ID NO: 108682 - DNA, 21 bp, Artificial Sequence
  primer
tttccagttgtccattagccc

SEQ ID NO: 108683 - DNA, 20 bp, Artificial Sequence
  primer
tgaggaactcgatagcctgc

SEQ ID NO: 108684 - DNA, 21 bp, Artificial Sequence
  primer
aactctcgacctcctgtttgc

SEQ ID NO: 108685 - DNA, 38 bp, Artificial Sequence
  primer
gtaaaacgacggccagtggagctcctcctcctctaagc

SEQ ID NO: 108686 - DNA, 21 bp, Artificial Sequence
  primer
ttaccaaatggcagatgatgc

SEQ ID NO: 108687 - DNA, 38 bp, Artificial Sequence
  primer
gtaaaacgacggccagtacccactccatgcttaattgg

SEQ ID NO: 108688 - DNA, 38 bp, Artificial Sequence
  primer
gtaaaacgacggccagttagaggagagcagggtgatcg

SEQ ID NO: 108689 - DNA, 21 bp, Artificial Sequence
  primer
cattccaggaggtctccagtc

SEQ ID NO: 108690 - DNA, 38 bp, Artificial Sequence
  primer
gtaaaacgacggccagttttaaagacaaggctgcctcc

SEQ ID NO: 108691 - DNA, 20 bp, Artificial Sequence
  primer
ctggaatcaagtttgcctgc

SEQ ID NO: 108692 - DNA, 38 bp, Artificial Sequence
  primer
gtaaaacgacggccagtctctgtagaaggctgggcttg

SEQ ID NO: 108693 - DNA, 20 bp, Artificial Sequence
  primer
gggactacagcagggctacc

SEQ ID NO: 108694 - DNA, 19 bp, Artificial Sequence
  primer
ctaggaggcacagggcaag

SEQ ID NO: 108695 - DNA, 22 bp, Artificial Sequence
  primer
aagtcagtctcaatgcctctgc

SEQ ID NO: 108696 - DNA, 21 bp, Artificial Sequence
  primer
ttgacatagcgtgggacaaag

SEQ ID NO: 108697 - DNA, 38 bp, Artificial Sequence
  primer
gtaaaacgacggccagttaggaacgccttgaacaacag

SEQ ID NO: 108698 - DNA, 21 bp, Artificial Sequence
  primer
gtagggccctggctctatttc

SEQ ID NO: 108699 - DNA, 38 bp, Artificial Sequence
  primer
gtaaaacgacggccagtacctctgcccttcattcagac

SEQ ID NO: 108700 - DNA, 21 bp, Artificial Sequence
  primer
taggaggaggaagattggtgc

SEQ ID NO: 108701 - DNA, 21 bp, Artificial Sequence
  primer
tgggacagacgactgaagatg

SEQ ID NO: 108702 - DNA, 21 bp, Artificial Sequence
  primer
tcttccaaaggatgcagagtg

SEQ ID NO: 108703 - DNA, 21 bp, Artificial Sequence
  primer
attgctctgcatcttctctgc

SEQ ID NO: 108704 - DNA, 19 bp, Artificial Sequence
  primer
aaagagccaagttgctggc

SEQ ID NO: 108705 - DNA, 21 bp, Artificial Sequence
  primer
gtggtggagagggagaaattg

SEQ ID NO: 108706 - DNA, 22 bp, Artificial Sequence
  primer
gcaacctgcaaacgtgtttatc

SEQ ID NO: 108707 - DNA, 37 bp, Artificial Sequence
  primer
gtaaaacgacggccagtgctgggtgacgctgtttatc

SEQ ID NO: 108708 - DNA, 38 bp, Artificial Sequence
  primer
gtaaaacgacggccagtagagtagaggaacacgcgcac

SEQ ID NO: 108709 - DNA, 38 bp, Artificial Sequence
  primer
gtaaaacgacggccagtaggacctacacagcctcaacc

SEQ ID NO: 108710 - DNA, 20 bp, Artificial Sequence
  primer
ggtgactcaggaagctgtgc

SEQ ID NO: 108711 - DNA, 21 bp, Artificial Sequence
  primer
catcctccaaaggatgcagag

SEQ ID NO: 108712 - DNA, 21 bp, Artificial Sequence
  primer
ctcattgctctgcgtcttctc

SEQ ID NO: 108713 - DNA, 20 bp, Artificial Sequence
  primer
ctcccttcagtcctccatcc

SEQ ID NO: 108714 - DNA, 22 bp, Artificial Sequence
  primer
ggtggtggagaaggagaaattg

SEQ ID NO: 108715 - DNA, 21 bp, Artificial Sequence
  primer
ctgagggcaacagaaatgtgg

SEQ ID NO: 108716 - DNA, 37 bp, Artificial Sequence; identical to SEQ ID NO: 108707
  primer

SEQ ID NO: 108717 - DNA, 38 bp, Artificial Sequence
  primer
gtaaaacgacggccagtaaacctgtaccaatgtctgcg

SEQ ID NO: 108718 - DNA, 21 bp, Artificial Sequence
  primer
cactgttcccaggtgtcaatc

SEQ ID NO: 108719 - DNA, 20 bp, Artificial Sequence
  primer
ggtgactcaggaagctgtgc

SEQ ID NO: 108720 - DNA, 37 bp, Artificial Sequence
  primer
gtaaaacgacggccagtcccattctaggcatggtctg

SEQ ID NO: 108721 - DNA, 38 bp, Artificial Sequence
  primer
gtaaaacgacggccagttagatggcagcagtagccaag

SEQ ID NO: 108722 - DNA, 38 bp, Artificial Sequence
  primer
gtaaaacgacggccagtagaggtggcggaggtaatcag

SEQ ID NO: 108723 - DNA, 37 bp, Artificial Sequence
  primer
gtaaaacgacggccagttagaatggactccaccctgc

SEQ ID NO: 108724 - DNA, 38 bp, Artificial Sequence
  primer
gtaaaacgacggccagtcctgagagaattggctctccc

SEQ ID NO: 108725 - DNA, 38 bp, Artificial Sequence
  primer
gtaaaacgacggccagttgactttaggttggccagcag

SEQ ID NO: 108726 - DNA, 21 bp, Artificial Sequence
  primer
caggtccgtatagttggagcc

SEQ ID NO: 108727 - DNA, 19 bp, Artificial Sequence
  primer
gaagaatggcggagaaggg

SEQ ID NO: 108728 - DNA, 22 bp, Artificial Sequence
  primer
tcagagatctttccaggtttgc

SEQ ID NO: 108729 - DNA, 24 bp, Artificial Sequence
  primer
agcgttagaaacaaagacatcaag

SEQ ID NO: 108730 - DNA, 21 bp, Artificial Sequence
  primer
tcctgcctgggtgatagagtc

SEQ ID NO: 108731 - DNA, 38 bp, Artificial Sequence
  primer
gtaaaacgacggccagtcctttggtctgttatccctcc

SEQ ID NO: 108732 - DNA, 38 bp, Artificial Sequence
  primer
gtaaaacgacggccagttaatcaacagctcccttgtgg

SEQ ID NO: 108733 - DNA, 39 bp, Artificial Sequence
  primer
gtaaaacgacggccagttggattgggattacagaactgc

SEQ ID NO: 108734 - DNA, 42 bp, Artificial Sequence
  primer
gtaaaacgacggccagtcagaatgtcttgctttattgtttgg

SEQ ID NO: 108735 - DNA, 38 bp, Artificial Sequence
  primer
gtaaaacgacggccagtggtgcaaacacaaagaaccag

SEQ ID NO: 108736 - DNA, 21 bp, Artificial Sequence
  primer
tgacactattggcaaggatgg

SEQ ID NO: 108737 - DNA, 39 bp, Artificial Sequence
  primer
gtaaaacgacggccagtccattactgatgagggtgaagg

SEQ ID NO: 108738 - DNA, 38 bp, Artificial Sequence
  primer
gtaaaacgacggccagtgatgaagtcagctgggtttcc

SEQ ID NO: 108739 - DNA, 39 bp, Artificial Sequence
  primer
gtaaaacgacggccagtttcctcttacctttgacctccc

SEQ ID NO: 108740 - DNA, 21 bp, Artificial Sequence
  primer
tgactgtgtcaaaccctggac

SEQ ID NO: 108741 - DNA, 21 bp, Artificial Sequence
  primer
gcagaacacagggacaagatg

SEQ ID NO: 108742 - DNA, 37 bp, Artificial Sequence
  primer
gtaaaacgacggccagtaatctccctgtctcccatgc

SEQ ID NO: 108743 - DNA, 21 bp, Artificial Sequence
  primer
tcagggctcagaagtgtcaag

SEQ ID NO: 108744 - DNA, 21 bp, Artificial Sequence
  primer
tcaggctgaaccttagaccac

SEQ ID NO: 108745 - DNA, 21 bp, Artificial Sequence
  primer
gagaaggtgttgagggcattc

SEQ ID NO: 108746 - DNA, 21 bp, Artificial Sequence
  primer
actgacaccaccacctgattg

SEQ ID NO: 108747 - DNA, 21 bp, Artificial Sequence
  primer
cctgatagtgctcctggactg

SEQ ID NO: 108748 - DNA, 38 bp, Artificial Sequence
  primer
gtaaaacgacggccagtgggcttcaaggatgaggaaac

SEQ ID NO: 108749 - DNA, 22 bp, Artificial Sequence
  primer
tgggttatttcatggactgagg

SEQ ID NO: 108750 - DNA, 20 bp, Artificial Sequence
  primer
gcacacagcaggcacataac

SEQ ID NO: 108751 - DNA, 37 bp, Artificial Sequence
  primer
gtaaaacgacggccagtgtcgggaaggagatgctgag

SEQ ID NO: 108752 - DNA, 21 bp, Artificial Sequence
  primer
ttcctagcagggacaaacagc

SEQ ID NO: 108753 - DNA, 39 bp, Artificial Sequence
  primer
gtaaaacgacggccagtaaaggaagagaaacaagggctg

SEQ ID NO: 108754 - DNA, 18 bp, Artificial Sequence
  primer
atcagtggccacgcaaac

SEQ ID NO: 108755 - DNA, 20 bp, Artificial Sequence
  primer
ccattcagcaccactatggg

SEQ ID NO: 108756 - DNA, 18 bp, Artificial Sequence
  primer
tggcgcgtgaagaagttg

SEQ ID NO: 108757 - DNA, 21 bp, Artificial Sequence
  primer
gcagtgcctcaagaacttgtc

SEQ ID NO: 108758 - DNA, 21 bp, Artificial Sequence
  primer
ctgtgagtccctttaccgacg

SEQ ID NO: 108759 - DNA, 21 bp, Artificial Sequence
  primer
aaatttcagcttgcctcttgc

SEQ ID NO: 108760 - DNA, 21 bp, Artificial Sequence
  primer
acgctaattgagaagcagcac

SEQ ID NO: 108761 - DNA, 19 bp, Artificial Sequence
  primer
gaacccgaaccctcctctc

SEQ ID NO: 108762 - DNA, 38 bp, Artificial Sequence
  primer
gtaaaacgacggccagttggcacaatcatagctcactg

SEQ ID NO: 108763 - DNA, 35 bp, Artificial Sequence
  primer
gtaaaacgacggccagtaccgtgcccagcctaaac

SEQ ID NO: 108764 - DNA, 26 bp, Artificial Sequence
  primer
tccaacttatacagtgagtctggatg

SEQ ID NO: 108765 - DNA, 19 bp, Artificial Sequence
  primer
tgactgcagcctcccaaag

SEQ ID NO: 108766 - DNA, 37 bp, Artificial Sequence
  primer
gtaaaacgacggccagtgtggcacccacctgtagtcc

SEQ ID NO: 108767 - DNA, 39 bp, Artificial Sequence
  primer
gtaaaacgacggccagtggactacagtcatgagccattg

SEQ ID NO: 108768 - DNA, 37 bp, Artificial Sequence; identical to SEQ ID NO: 103156
  primer

SEQ ID NO: 108769 - DNA, 40 bp, Artificial Sequence
  primer
gtaaaacgacggccagttttcccacacaaccttatgattt

SEQ ID NO: 108770 - DNA, 21 bp, Artificial Sequence
  primer
tcaggagttcaagaccagctt

SEQ ID NO: 108771 - DNA, 38 bp, Artificial Sequence
  primer
gtaaaacgacggccagtgctgcagtgagaagtgattgc

SEQ ID NO: 108772 - DNA, 40 bp, Artificial Sequence
  primer
gtaaaacgacggccagtcatacagattgcccattctcatc

SEQ ID NO: 108773 - DNA, 26 bp, Artificial Sequence
  primer
gcagtaagtcaaatgtgtacaatgaa

SEQ ID NO: 108774 - DNA, 21 bp, Artificial Sequence
  primer
ggtgggaggatcatttgagac

SEQ ID NO: 108775 - DNA, 21 bp, Artificial Sequence
  primer
ggtgggaggatcatttgagac

SEQ ID NO: 108776 - DNA, 38 bp, Artificial Sequence
  primer
gtaaaacgacggccagtaacagtgtgagttcagcaggc

SEQ ID NO: 108777 - DNA, 21 bp, Artificial Sequence
  primer
taggcaggcattaagttgtcg

SEQ ID NO: 108778 - DNA, 21 bp, Artificial Sequence
  primer
cctcttctctatggcctgctt

SEQ ID NO: 108779 - DNA, 21 bp, Artificial Sequence
  primer
gagtacagagtggcaacaggc

SEQ ID NO: 108780 - DNA, 21 bp, Artificial Sequence
  primer
agtgctcagagctgagtgagg

SEQ ID NO: 108781 - DNA, 20 bp, Artificial Sequence
  primer
agctctggagttcttgcctg

SEQ ID NO: 108782 - DNA, 18 bp, Artificial Sequence
  primer
aagcgctttccctcctcc

SEQ ID NO: 108783 - DNA, 37 bp, Artificial Sequence
  primer
gtaaaacgacggccagtcgcctcttcacaatttccag

SEQ ID NO: 108784 - DNA, 21 bp, Artificial Sequence
  primer
actttgaatcacccgaattgc

SEQ ID NO: 108785 - DNA, 20 bp, Artificial Sequence
  primer
cacagtgccagacacacagc

SEQ ID NO: 108786 - DNA, 22 bp, Artificial Sequence
  primer
tgggaatcactgtgaagttctg

SEQ ID NO: 108787 - DNA, 38 bp, Artificial Sequence
  primer
gtaaaacgacggccagttccagacctcctctctgaagc

SEQ ID NO: 108788 - DNA, 40 bp, Artificial Sequence
  primer
gtaaaacgacggccagttgaatcccagtgaaatgaatgag

SEQ ID NO: 108789 - DNA, 35 bp, Artificial Sequence
  primer
gtaaaacgacggccagtaagccgcccatgagtagg

SEQ ID NO: 108790 - DNA, 39 bp, Artificial Sequence
  primer
gtaaaacgacggccagttctctaccatctctgcattccc

SEQ ID NO: 108791 - DNA, 21 bp, Artificial Sequence
  primer
gtcgtatttgcggacaatctg

SEQ ID NO: 108792 - DNA, 38 bp, Artificial Sequence
  primer
gtaaaacgacggccagtgaggtgagctgggattcaaac

SEQ ID NO: 108793 - DNA, 37 bp, Artificial Sequence
  primer
gtaaaacgacggccagtcctgctcctagccgcaatag

SEQ ID NO: 108794 - DNA, 37 bp, Artificial Sequence
  primer
gtaaaacgacggccagtaaagctaacctggagctggc

SEQ ID NO: 108795 - DNA, 18 bp, Artificial Sequence
  primer
gcgtgaatgaggttccgc

SEQ ID NO: 108796 - DNA, 38 bp, Artificial Sequence
  primer
gtaaaacgacggccagtccatagctgtagtctgagccg

SEQ ID NO: 108797 - DNA, 21 bp, Artificial Sequence
  primer
ttattcggaagttggctaggg

SEQ ID NO: 108798 - DNA, 21 bp, Artificial Sequence
  primer
gcataagaattgcagccacag

SEQ ID NO: 108799 - DNA, 27 bp, Artificial Sequence
  primer
aaatataaagtcaacacaacactcctt

SEQ ID NO: 108800 - DNA, 37 bp, Artificial Sequence; identical to SEQ ID NO: 108794
  primer

SEQ ID NO: 108801 - DNA, 18 bp, Artificial Sequence
  primer
cagtgccttcaggctccc

SEQ ID NO: 108802 - DNA, 38 bp, Artificial Sequence
  primer
gtaaaacgacggccagtgagtcttcaagcatggtgtgc

SEQ ID NO: 108803 - DNA, 36 bp, Artificial Sequence
  primer
gtaaaacgacggccagtgtgcctaggtgcccatctc

SEQ ID NO: 108804 - DNA, 20 bp, Artificial Sequence
  primer
acatttccacccagggaaag

SEQ ID NO: 108805 - DNA, 21 bp, Artificial Sequence
  primer
cctgaagtccctgaaatggag

SEQ ID NO: 108806 - DNA, 20 bp, Artificial Sequence
  primer
caccttcaggaacagcttgg

SEQ ID NO: 108807 - DNA, 39 bp, Artificial Sequence
  primer
gtaaaacgacggccagtcacacacaggtttctacctccc

SEQ ID NO: 108808 - DNA, 21 bp, Artificial Sequence
  primer
gcattgagactgaggagggtc

SEQ ID NO: 108809 - DNA, 21 bp, Artificial Sequence
  primer
cgggttcacagtgtatccaac

SEQ ID NO: 108810 - DNA, 35 bp, Artificial Sequence
  primer
gtaaaacgacggccagtccagcagaggtgacggac

SEQ ID NO: 108811 - DNA, 21 bp, Artificial Sequence
  primer
tactggaacccaggtctcctc

SEQ ID NO: 108812 - DNA, 36 bp, Artificial Sequence
  primer
gtaaaacgacggccagtgaaggctgaggctctgagg

SEQ ID NO: 108813 - DNA, 38 bp, Artificial Sequence
  primer
gtaaaacgacggccagtttgaacgagtgaaagagtggg

SEQ ID NO: 108814 - DNA, 38 bp, Artificial Sequence
  primer
gtaaaacgacggccagttgtccaacgtcttctcacctc

SEQ ID NO: 108815 - DNA, 21 bp, Artificial Sequence
  primer
ctattctgccggttatccacc

SEQ ID NO: 108816 - DNA, 21 bp, Artificial Sequence
  primer
ggacatatggaatccaggagc

SEQ ID NO: 108817 - DNA, 21 bp, Artificial Sequence
  primer
tccgacaactggtagcatgag

SEQ ID NO: 108818 - DNA, 21 bp, Artificial Sequence
  primer
gtccttggagggatgaaggtc

SEQ ID NO: 108819 - DNA, 21 bp, Artificial Sequence
  primer
acctctcccatctcatccttg

SEQ ID NO: 108820 - DNA, 21 bp, Artificial Sequence
  primer
tttcaggctcagagaaggcag

SEQ ID NO: 108821 - DNA, 21 bp, Artificial Sequence
  primer
tctgcacactcctaccctgtg

SEQ ID NO: 108822 - DNA, 38 bp, Artificial Sequence
  primer
gtaaaacgacggccagtaaggagttcctcccacctctc

SEQ ID NO: 108823 - DNA, 20 bp, Artificial Sequence
  primer
gtcccacatttgctctgcac

SEQ ID NO: 108824 - DNA, 21 bp, Artificial Sequence
  primer
cccaatggtagagtgggacag

SEQ ID NO: 108825 - DNA, 36 bp, Artificial Sequence
  primer
gtaaaacgacggccagtatgaaggtctccgtgtcgg

SEQ ID NO: 108826 - DNA, 38 bp, Artificial Sequence
  primer
gtaaaacgacggccagtagaaggcacgtgaatacctcg

SEQ ID NO: 108827 - DNA, 21 bp, Artificial Sequence
  primer
taagccaagctggtctacgtg

SEQ ID NO: 108828 - DNA, 38 bp, Artificial Sequence
  primer
gtaaaacgacggccagtttgtttccaacttccaaaccc

SEQ ID NO: 108829 - DNA, 22 bp, Artificial Sequence
  primer
gagtgtttgagaacagggttgg

SEQ ID NO: 108830 - DNA, 21 bp, Artificial Sequence
  primer
accctcacttacactccaggc

SEQ ID NO: 108831 - DNA, 38 bp, Artificial Sequence
  primer
gtaaaacgacggccagtggccaagtgcatacttcacac

SEQ ID NO: 108832 - DNA, 38 bp, Artificial Sequence
  primer
gtaaaacgacggccagtaggttctcacagtcagggagc

SEQ ID NO: 108833 - DNA, 21 bp, Artificial Sequence
  primer
tccagtgagagagaaggagga

SEQ ID NO: 108834 - DNA, 39 bp, Artificial Sequence
  primer
gtaaaacgacggccagttgaggagagtcagaattccagg

SEQ ID NO: 108835 - DNA, 19 bp, Artificial Sequence
  primer
gaacatgtgcccaggtgag

SEQ ID NO: 108836 - DNA, 38 bp, Artificial Sequence
  primer
gtaaaacgacggccagtgctaatttgaatgggcctgtg

SEQ ID NO: 108837 - DNA, 38 bp, Artificial Sequence
  primer
gtaaaacgacggccagttgggataggtgggtacactgc

SEQ ID NO: 108838 - DNA, 21 bp, Artificial Sequence
  primer
aaaggtggaacagatgtggtg

SEQ ID NO: 108839 - DNA, 38 bp, Artificial Sequence
  primer
gtaaaacgacggccagtaaataccaggctacaccgcag

SEQ ID NO: 108840 - DNA, 21 bp, Artificial Sequence
  primer
tcatcacagctctgaaggaca

SEQ ID NO: 108841 - DNA, 38 bp, Artificial Sequence
  primer
gtaaaacgacggccagttggacatcccaagatcctgtc

SEQ ID NO: 108842 - DNA, 38 bp, Artificial Sequence
  primer
gtaaaacgacggccagtctctgccttagcctccagttg

SEQ ID NO: 108843 - DNA, 20 bp, Artificial Sequence
  primer
ttgttgagccaaattcccag

SEQ ID NO: 108844 - DNA, 38 bp, Artificial Sequence
  primer
gtaaaacgacggccagtgggtattggacatccatcctg

SEQ ID NO: 108845 - DNA, 37 bp, Artificial Sequence
  primer
gtaaaacgacggccagtgaatgggcctgtgtcatctg

SEQ ID NO: 108846 - DNA, 38 bp, Artificial Sequence
  primer
gtaaaacgacggccagtgacagcaagtcacgtctcagg

SEQ ID NO: 108847 - DNA, 21 bp, Artificial Sequence
  primer
cttctaatgtgggtgggatgc

SEQ ID NO: 108848 - DNA, 38 bp, Artificial Sequence
  primer
gtaaaacgacggccagtcaagctggagaaataccaggc

SEQ ID NO: 108849 - DNA, 21 bp, Artificial Sequence
  primer
ctgagccgcttctgtttcttc

SEQ ID NO: 108850 - DNA, 37 bp, Artificial Sequence
  primer
gtaaaacgacggccagtgtctttcctggctaggaccc

SEQ ID NO: 108851 - DNA, 21 bp, Artificial Sequence
  primer
atacacatggagaggccacag

SEQ ID NO: 108852 - DNA, 21 bp, Artificial Sequence
  primer
cttgttgagccaaattcccag

SEQ ID NO: 108853 - DNA, 21 bp, Artificial Sequence
  primer
gtgtccttggagacaggcttc

SEQ ID NO: 108854 - DNA, 37 bp, Artificial Sequence
  primer
gtaaaacgacggccagtatttgaacgggtctgtgtcg

SEQ ID NO: 108855 - DNA, 38 bp, Artificial Sequence
  primer
gtaaaacgacggccagtctgaatgttgccctgtctctg

SEQ ID NO: 108856 - DNA, 21 bp, Artificial Sequence
  primer
agtggaaaggtggaatggatg

SEQ ID NO: 108857 - DNA, 38 bp, Artificial Sequence
  primer
gtaaaacgacggccagtaaggaagtatcagctgctggc

SEQ ID NO: 108858 - DNA, 20 bp, Artificial Sequence
  primer
tcttatacccgcctcttccg

SEQ ID NO: 108859 - DNA, 21 bp, Artificial Sequence
  primer
ctggaagtctgcctcattctg

SEQ ID NO: 108860 - DNA, 21 bp, Artificial Sequence
  primer
gctctgagtccttcttcctcc

SEQ ID NO: 108861 - DNA, 21 bp, Artificial Sequence
  primer
tggtgtctccagtttcgtctg

SEQ ID NO: 108862 - DNA, 21 bp, Artificial Sequence
  primer
atgtctgcgtttcttccaagg

SEQ ID NO: 108863 - DNA, 38 bp, Artificial Sequence
  primer
gtaaaacgacggccagttcctccctttccctattctcc

SEQ ID NO: 108864 - DNA, 38 bp, Artificial Sequence
  primer
gtaaaacgacggccagtcatccaggtggtacccatagc

SEQ ID NO: 108865 - DNA, 37 bp, Artificial Sequence
  primer
gtaaaacgacggccagtctccaaccctccacacactc

SEQ ID NO: 108866 - DNA, 38 bp, Artificial Sequence
  primer
gtaaaacgacggccagtaatgggataaggcaggtgaag

SEQ ID NO: 108867 - DNA, 38 bp, Artificial Sequence
  primer
gtaaaacgacggccagtctctcagaggcaggaagttgc

SEQ ID NO: 108868 - DNA, 40 bp, Artificial Sequence
  primer
gtaaaacgacggccagtaccctgatatgatcaattcacaa

SEQ ID NO: 108869 - DNA, 37 bp, Artificial Sequence
  primer
gtaaaacgacggccagtgtcccaggagctcttcaagc

SEQ ID NO: 108870 - DNA, 25 bp, Artificial Sequence
  primer
agtgtgttaatgtcaaagtattgcg

SEQ ID NO: 108871 - DNA, 18 bp, Artificial Sequence
  primer
cctgcccattctgcacac

SEQ ID NO: 108872 - DNA, 21 bp, Artificial Sequence
  primer
gctcatgaagtgtttcttgcc

SEQ ID NO: 108873 - DNA, 38 bp, Artificial Sequence
  primer
gtaaaacgacggccagtaacttagagccaatggcacag

SEQ ID NO: 108874 - DNA, 22 bp, Artificial Sequence
  primer
aacagcagagtccagaaagctg

SEQ ID NO: 108875 - DNA, 21 bp, Artificial Sequence
  primer
aaagcaattcagccaaacctc

SEQ ID NO: 108876 - DNA, 21 bp, Artificial Sequence
  primer
tccctcacagagagaagggag

SEQ ID NO: 108877 - DNA, 25 bp, Artificial Sequence
  primer
tttcattccactatttctgacactg

SEQ ID NO: 108878 - DNA, 38 bp, Artificial Sequence
  primer
gtaaaacgacggccagtccgagaagctctgctagtctg

SEQ ID NO: 108879 - DNA, 21 bp, Artificial Sequence
  primer
ctcagcttcaaaccctgcttc

SEQ ID NO: 108880 - DNA, 22 bp, Artificial Sequence
  primer
aaatgtacttcagggcttggtc

SEQ ID NO: 108881 - DNA, 26 bp, Artificial Sequence
  primer
cctatcctgacatccttattgttcag

SEQ ID NO: 108882 - DNA, 38 bp, Artificial Sequence
  primer
gtaaaacgacggccagttcacaccattaaattgggaca

SEQ ID NO: 108883 - DNA, 38 bp, Artificial Sequence
  primer
gtaaaacgacggccagttcacccagtgatggtagaggg

SEQ ID NO: 108884 - DNA, 21 bp, Artificial Sequence
  primer
gtaccactgcagagaaggcac

SEQ ID NO: 108885 - DNA, 21 bp, Artificial Sequence
  primer
acgggtcagaagaagcatcac

SEQ ID NO: 108886 - DNA, 41 bp, Artificial Sequence
  primer
gtaaaacgacggccagtgaaacatcaaagaagttcagaggg

SEQ ID NO: 108887 - DNA, 38 bp, Artificial Sequence
  primer
gtaaaacgacggccagtcagccatgcagataggctaag

SEQ ID NO: 108888 - DNA, 38 bp, Artificial Sequence
  primer
gtaaaacgacggccagtccctgaaatgtttccaaggac

SEQ ID NO: 108889 - DNA, 41 bp, Artificial Sequence
  primer
gtaaaacgacggccagttctgtacctaaagattggaggctg

SEQ ID NO: 108890 - DNA, 38 bp, Artificial Sequence
  primer
gtaaaacgacggccagttccatgatgtttagtgcaggc

SEQ ID NO: 108891 - DNA, 38 bp, Artificial Sequence
  primer
gtaaaacgacggccagtctctgtcatcctcctccattg

SEQ ID NO: 108892 - DNA, 39 bp, Artificial Sequence
  primer
gtaaaacgacggccagttcttgtgttgttagagggttgg

SEQ ID NO: 108893 - DNA, 21 bp, Artificial Sequence
  primer
gcacatgggtgttaagagtgg

SEQ ID NO: 108894 - DNA, 23 bp, Artificial Sequence
  primer
ttggatgcttatgggatattgag

SEQ ID NO: 108895 - DNA, 21 bp, Artificial Sequence
  primer
gaatcaggacaggaggtgttg

SEQ ID NO: 108896 - DNA, 23 bp, Artificial Sequence
  primer
tctaacatgcaaagacccaaatc

SEQ ID NO: 108897 - DNA, 21 bp, Artificial Sequence
  primer
aaagaggaagctgacactggg

SEQ ID NO: 108898 - DNA, 21 bp, Artificial Sequence
  primer
cttggctctcagcttcaaacc

SEQ ID NO: 108899 - DNA, 22 bp, Artificial Sequence
  primer
aatgcacttcagagcttgatcc

SEQ ID NO: 108900 - DNA, 27 bp, Artificial Sequence
  primer
aaacttaaagtgcttctcaagcattac

SEQ ID NO: 108901 - DNA, 39 bp, Artificial Sequence
  primer
gtaaaacgacggccagtggaaggaggacactagcaacac

SEQ ID NO: 108902 - DNA, 21 bp, Artificial Sequence
  primer
gttatgcacttctctcacccg

SEQ ID NO: 108903 - DNA, 21 bp, Artificial Sequence
  primer
gtaccactgcagaggaggcac

SEQ ID NO: 108904 - DNA, 40 bp, Artificial Sequence
  primer
gtaaaacgacggccagtttcactagatcttcagggaaggg

SEQ ID NO: 108905 - DNA, 38 bp, Artificial Sequence
  primer
gtaaaacgacggccagttgccatgtataaatgcccttc

SEQ ID NO: 108906 - DNA, 38 bp, Artificial Sequence
  primer
gtaaaacgacggccagtctccctagtgcaggtggtttc

SEQ ID NO: 108907 - DNA, 38 bp, Artificial Sequence
  primer
gtaaaacgacggccagtgctttgtccaagagaccgttg

SEQ ID NO: 108908 - DNA, 21 bp, Artificial Sequence
  primer
acccatctatgcaaatcctgc

SEQ ID NO: 108909 - DNA, 21 bp, Artificial Sequence
  primer
ttgaagctgctctcagggttc

SEQ ID NO: 108910 - DNA, 21 bp, Artificial Sequence
  primer
ctatgttggaggaggtcaggc

SEQ ID NO: 108911 - DNA, 21 bp, Artificial Sequence
  primer
gtggcattgaggactaggtgg

SEQ ID NO: 108912 - DNA, 38 bp, Artificial Sequence
  primer
gtaaaacgacggccagtggtcaccaggaaagcaaagac

SEQ ID NO: 108913 - DNA, 21 bp, Artificial Sequence
  primer
cttgtcatcaatctgggcagt

SEQ ID NO: 108914 - DNA, 22 bp, Artificial Sequence
  primer
tgaacaaccacaatttgtctgc

SEQ ID NO: 108915 - DNA, 21 bp, Artificial Sequence
  primer
aatcctgatctcatccttcgg

SEQ ID NO: 108916 - DNA, 22 bp, Artificial Sequence
  primer
tcagatgcagtctaggagtccc

SEQ ID NO: 108917 - DNA, 38 bp, Artificial Sequence
  primer
gtaaaacgacggccagtccctcgaagctatgttgtttg

SEQ ID NO: 108918 - DNA, 37 bp, Artificial Sequence
  primer
gtaaaacgacggccagtgaggtctggacaccagcaag

SEQ ID NO: 108919 - DNA, 21 bp, Artificial Sequence
  primer
tgcatctagccatctcaccac

SEQ ID NO: 108920 - DNA, 21 bp, Artificial Sequence
  primer
tggagatgcagtatcccacag

SEQ ID NO: 108921 - DNA, 37 bp, Artificial Sequence
  primer
gtaaaacgacggccagtagggcacacagtgaggtttg

SEQ ID NO: 108922 - DNA, 24 bp, Artificial Sequence
  primer
aaggaatcagtttgagaaatcctg

SEQ ID NO: 108923 - DNA, 21 bp, Artificial Sequence
  primer
ggagccatactccttgctcag

SEQ ID NO: 108924 - DNA, 38 bp, Artificial Sequence
  primer
gtaaaacgacggccagtttgcatttggtgtcatcagtg

SEQ ID NO: 108925 - DNA, 21 bp, Artificial Sequence
  primer
gtggagcacacctgaagtacc

SEQ ID NO: 108926 - DNA, 38 bp, Artificial Sequence
  primer
gtaaaacgacggccagtcccactgtttcctctccattc

SEQ ID NO: 108927 - DNA, 38 bp, Artificial Sequence
  primer
gtaaaacgacggccagttaatgagctgtaagttggcgg

SEQ ID NO: 108928 - DNA, 20 bp, Artificial Sequence
  primer
ctgggtgacagagccagact

SEQ ID NO: 108929 - DNA, 38 bp, Artificial Sequence
  primer
gtaaaacgacggccagtctgggatactccttgccagtg

SEQ ID NO: 108930 - DNA, 38 bp, Artificial Sequence
  primer
gtaaaacgacggccagtggagtgagaggatttggcaag

SEQ ID NO: 108931 - DNA, 38 bp, Artificial Sequence
  primer
gtaaaacgacggccagtgcagactgtggaccaagaagg

SEQ ID NO: 108932 - DNA, 38 bp, Artificial Sequence
  primer
gtaaaacgacggccagtgttagccacacctcttcctgc

SEQ ID NO: 108933 - DNA, 39 bp, Artificial Sequence
  primer
gtaaaacgacggccagtcagtcaccaaggtgcctttaac

SEQ ID NO: 108934 - DNA, 21 bp, Artificial Sequence
  primer
cagtgctgggcatagaacaag

SEQ ID NO: 108935 - DNA, 22 bp, Artificial Sequence
  primer
gaacaacataggtggataggcg

SEQ ID NO: 108936 - DNA, 38 bp, Artificial Sequence
  primer
gtaaaacgacggccagttccaaagagatccagcctagc

SEQ ID NO: 108937 - DNA, 40 bp, Artificial Sequence
  primer
gtaaaacgacggccagtcactcatgactgttctgcctctc

SEQ ID NO: 108938 - DNA, 21 bp, Artificial Sequence
  primer
gtaggaatccttcctgctccc

SEQ ID NO: 108939 - DNA, 21 bp, Artificial Sequence
  primer
acagcaagatggagtgagtcg

SEQ ID NO: 108940 - DNA, 38 bp, Artificial Sequence
  primer
gtaaaacgacggccagtcaaggctaattcggacgagac

SEQ ID NO: 108941 - DNA, 38 bp, Artificial Sequence
  primer
gtaaaacgacggccagtccataagtccaaccaggaagg

SEQ ID NO: 108942 - DNA, 23 bp, Artificial Sequence
  primer
cagcctgaaaggtcctcaaatac

SEQ ID NO: 108943 - DNA, 38 bp, Artificial Sequence
  primer
gtaaaacgacggccagtgctgaggtagctgaggctttc

SEQ ID NO: 108944 - DNA, 22 bp, Artificial Sequence
  primer
caccgtagcacattggttgtag

SEQ ID NO: 108945 - DNA, 38 bp, Artificial Sequence
  primer
gtaaaacgacggccagtgcatcgcaggagttcctaaag

SEQ ID NO: 108946 - DNA, 22 bp, Artificial Sequence
  primer
gacacatctgtgttcatttggc

SEQ ID NO: 108947 - DNA, 38 bp, Artificial Sequence
  primer
gtaaaacgacggccagtcctgcctcctccctaggatac

SEQ ID NO: 108948 - DNA, 21 bp, Artificial Sequence
  primer
taagccatgtgcaaaggtcac

SEQ ID NO: 108949 - DNA, 38 bp, Artificial Sequence
  primer
gtaaaacgacggccagtagccctagagttcaaggcttc

SEQ ID NO: 108950 - DNA, 38 bp, Artificial Sequence
  primer
gtaaaacgacggccagtaagggcagctagttctcatgg

SEQ ID NO: 108951 - DNA, 21 bp, Artificial Sequence
  primer
gggacagacagatgtgcagag

SEQ ID NO: 108952 - DNA, 39 bp, Artificial Sequence
  primer
gtaaaacgacggccagtcctattctcaagtgatcagccc

SEQ ID NO: 108953 - DNA, 22 bp, Artificial Sequence
  primer
aagtcagggagacactgacagc

SEQ ID NO: 108954 - DNA, 21 bp, Artificial Sequence
  primer
cagtattcctcacacccaggc

SEQ ID NO: 108955 - DNA, 38 bp, Artificial Sequence
  primer
gtaaaacgacggccagtaactgcaggcgtgtaaatgtg

SEQ ID NO: 108956 - DNA, 37 bp, Artificial Sequence
  primer
gtaaaacgacggccagtccttctccttggtcacgatg

SEQ ID NO: 108957 - DNA, 38 bp, Artificial Sequence
  primer
gtaaaacgacggccagtcctgttagttcaggatgcagg

SEQ ID NO: 108958 - DNA, 21 bp, Artificial Sequence
  primer
ttccttaaatggtccaaaggg

SEQ ID NO: 108959 - DNA, 38 bp, Artificial Sequence
  primer
gtaaaacgacggccagttgccatgaacaaaggaaacac

SEQ ID NO: 108960 - DNA, 38 bp, Artificial Sequence
  primer
gtaaaacgacggccagtgaagccaccagatcactgagg

SEQ ID NO: 108961 - DNA, 22 bp, Artificial Sequence
  primer
gagggctgaacattccctagac

SEQ ID NO: 108962 - DNA, 43 bp, Artificial Sequence
  primer
gtaaaacgacggccagtgatcccttctcttatattagcttgcc

SEQ ID NO: 108963 - DNA, 38 bp, Artificial Sequence
  primer
gtaaaacgacggccagtgctggattcactgtcctttgc

SEQ ID NO: 108964 - DNA, 21 bp, Artificial Sequence
  primer
ctcagtgtgtctgcttccctg

SEQ ID NO: 108965 - DNA, 19 bp, Artificial Sequence
  primer
cagctcctgcctgctcttc

SEQ ID NO: 108966 - DNA, 38 bp, Artificial Sequence
  primer
gtaaaacgacggccagtcgaaggtgatattggagggag

SEQ ID NO: 108967 - DNA, 21 bp, Artificial Sequence
  primer
gaggccacatgaccagctaac

SEQ ID NO: 108968 - DNA, 21 bp, Artificial Sequence
  primer
ccgtttcacagacaaggagac

SEQ ID NO: 108969 - DNA, 20 bp, Artificial Sequence
  primer
gtctagctcctcctgcaccc

SEQ ID NO: 108970 - DNA, 18 bp, Artificial Sequence
  primer
cacccaccagacgctcag

SEQ ID NO: 108971 - DNA, 37 bp, Artificial Sequence
  primer
gtaaaacgacggccagtgatgtccaggcacagagtgg

SEQ ID NO: 108972 - DNA, 21 bp, Artificial Sequence
  primer
cctttagttgaggcaagcagg

SEQ ID NO: 108973 - DNA, 20 bp, Artificial Sequence
  primer
ttgcatttcaatggccaaac

SEQ ID NO: 108974 - DNA, 40 bp, Artificial Sequence
  primer
gtaaaacgacggccagtcaacctgacaatgtttgaagtcc

SEQ ID NO: 108975 - DNA, 38 bp, Artificial Sequence
  primer
gtaaaacgacggccagtcggcttctctcccacttaaac

SEQ ID NO: 108976 - DNA, 44 bp, Artificial Sequence
  primer
gtaaaacgacggccagtaggatacctcttctacataggttgttg

SEQ ID NO: 108977 - DNA, 23 bp, Artificial Sequence
  primer
tcagaggacagaatttgcttgag

SEQ ID NO: 108978 - DNA, 28 bp, Artificial Sequence
  primer
ggattctacctgatcaatttatatcctg

SEQ ID NO: 108979 - DNA, 23 bp, Artificial Sequence
  primer
ctgataagcaagtgaagtgatgc

SEQ ID NO: 108980 - DNA, 21 bp, Artificial Sequence
  primer
acgagagaaatatggctgctt

SEQ ID NO: 108981 - DNA, 21 bp, Artificial Sequence
  primer
agagacactgcacaggaccac

SEQ ID NO: 108982 - DNA, 21 bp, Artificial Sequence
  primer
tcaggcctaagtgaggaaatg

SEQ ID NO: 108983 - DNA, 20 bp, Artificial Sequence
  primer
agctcaggtctaggtgctgc

SEQ ID NO: 108984 - DNA, 38 bp, Artificial Sequence
  primer
gtaaaacgacggccagtcagtccacttgccttagcctc

SEQ ID NO: 108985 - DNA, 21 bp, Artificial Sequence
  primer
agagcccttgggtaaacattg

SEQ ID NO: 108986 - DNA, 21 bp, Artificial Sequence
  primer
tttccttggagcctctttgtc

SEQ ID NO: 108987 - DNA, 38 bp, Artificial Sequence
  primer
gtaaaacgacggccagtaggatgaagtggacgtggaac

SEQ ID NO: 108988 - DNA, 21 bp, Artificial Sequence
  primer
taggcagctcaaattcagtgg

SEQ ID NO: 108989 - DNA, 21 bp, Artificial Sequence
  primer
tgaagttgcattaccacagcc

SEQ ID NO: 108990 - DNA, 21 bp, Artificial Sequence
  primer
gatgacagggtttgtgacagg

SEQ ID NO: 108991 - DNA, 24 bp, Artificial Sequence
  primer
ttgctctaaacatgagcagtcttc

SEQ ID NO: 108992 - DNA, 21 bp, Artificial Sequence
  primer
ttcaaacatgtgtcgttctgc

SEQ ID NO: 108993 - DNA, 21 bp, Artificial Sequence
  primer
attctcctgggaagtggtgag

SEQ ID NO: 108994 - DNA, 24 bp, Artificial Sequence
  primer
tgtcctgtagattaagagaggcag

SEQ ID NO: 108995 - DNA, 21 bp, Artificial Sequence
  primer
tgggcctaattgattctttgg

SEQ ID NO: 108996 - DNA, 38 bp, Artificial Sequence
  primer
gtaaaacgacggccagttgaagcccatcttcatttcag

SEQ ID NO: 108997 - DNA, 41 bp, Artificial Sequence
  primer
gtaaaacgacggccagttgttcacagtatttggcacttagg

SEQ ID NO: 108998 - DNA, 22 bp, Artificial Sequence
  primer
tggagcatacacaccatttctg

SEQ ID NO: 108999 - DNA, 20 bp, Artificial Sequence
  primer
ttgcaatgctcaattcccag

SEQ ID NO: 109000 - DNA, 21 bp, Artificial Sequence
  primer
ttctgtggattgtgtcaatgg

SEQ ID NO: 109001 - DNA, 22 bp, Artificial Sequence
  primer
gctcaaactcagtggactaccc

SEQ ID NO: 109002 - DNA, 21 bp, Artificial Sequence
  primer
ttgtgagcaacaccatcttgg

SEQ ID NO: 109003 - DNA, 24 bp, Artificial Sequence
  primer
ggatgatggttaaatggtatgtgg

SEQ ID NO: 109004 - DNA, 23 bp, Artificial Sequence
  primer
ccaagcttcaccttctttattcc

SEQ ID NO: 109005 - DNA, 21 bp, Artificial Sequence
  primer
atccaaatgtgtgcctttctg

SEQ ID NO: 109006 - DNA, 37 bp, Artificial Sequence
  primer
gtaaaacgacggccagtaattgtcctggcaagtggtg

SEQ ID NO: 109007 - DNA, 20 bp, Artificial Sequence
  primer
atgtgcatcgagagaggcag

SEQ ID NO: 109008 - DNA, 25 bp, Artificial Sequence
  primer
tggatagctccaattagattctttg

SEQ ID NO: 109009 - DNA, 40 bp, Artificial Sequence
  primer
gtaaaacgacggccagtcctgctttgtagtatgcaacgtg

SEQ ID NO: 109010 - DNA, 25 bp, Artificial Sequence
  primer
tggatagctccaattagattctttg

SEQ ID NO: 109011 - DNA, 38 bp, Artificial Sequence
  primer
gtaaaacgacggccagtccttagggaaagtcagggtcc

SEQ ID NO: 109012 - DNA, 21 bp, Artificial Sequence
  primer
tgtagcgtccaacacttcagc

SEQ ID NO: 109013 - DNA, 20 bp, Artificial Sequence
  primer
atgatccactgcacccagtc

SEQ ID NO: 109014 - DNA, 22 bp, Artificial Sequence
  primer
tttataacggcaagcagattcc

SEQ ID NO: 109015 - DNA, 21 bp, Artificial Sequence
  primer
ttatgcccagcctgtagtttg

SEQ ID NO: 109016 - DNA, 38 bp, Artificial Sequence
  primer
gtaaaacgacggccagttccagcatggagcagtaagtg

SEQ ID NO: 109017 - DNA, 20 bp, Artificial Sequence
  primer
gtggctctttggagttgcag

SEQ ID NO: 109018 - DNA, 22 bp, Artificial Sequence
  primer
tgacagctaaagtgtgtgaggg

SEQ ID NO: 109019 - DNA, 41 bp, Artificial Sequence
  primer
gtaaaacgacggccagttctaccaaatggcttctcttgttc

SEQ ID NO: 109020 - DNA, 21 bp, Artificial Sequence
  primer
ctggaaagtgcctccagctac

SEQ ID NO: 109021 - DNA, 38 bp, Artificial Sequence
  primer
gtaaaacgacggccagtctgccagtagcaaccgttctc

SEQ ID NO: 109022 - DNA, 25 bp, Artificial Sequence
  primer
ccacacgattgtcatgtagattaag

SEQ ID NO: 109023 - DNA, 20 bp, Artificial Sequence
  primer
ccaagtaggttctttggccc

SEQ ID NO: 109024 - DNA, 42 bp, Artificial Sequence
  primer
gtaaaacgacggccagtgattaagcccatctttatttcaagg

SEQ ID NO: 109025 - DNA, 38 bp, Artificial Sequence
  primer
gtaaaacgacggccagtcagttatgcactaccatgccc

SEQ ID NO: 109026 - DNA, 22 bp, Artificial Sequence
  primer
ggtgatgcctacacgctatttc

SEQ ID NO: 109027 - DNA, 21 bp, Artificial Sequence
  primer
cctttacctccctgaatttgc

SEQ ID NO: 109028 - DNA, 21 bp, Artificial Sequence
  primer
ggcaggatgaagtgtacatgg

SEQ ID NO: 109029 - DNA, 21 bp, Artificial Sequence
  primer
gcagactactcctcggaaagg

SEQ ID NO: 109030 - DNA, 21 bp, Artificial Sequence
  primer
tgaagttgcattaccacagcc

SEQ ID NO: 109031 - DNA, 21 bp, Artificial Sequence
  primer
tacgacaacaggatttctggc

SEQ ID NO: 109032 - DNA, 39 bp, Artificial Sequence
  primer
gtaaaacgacggccagtttcctcaaactccactttctgc

SEQ ID NO: 109033 - DNA, 21 bp, Artificial Sequence
  primer
cctctagaagttgcctccagc

SEQ ID NO: 109034 - DNA, 38 bp, Artificial Sequence
  primer
gtaaaacgacggccagtattctcctgggaagtggtgag

SEQ ID NO: 109035 - DNA, 21 bp, Artificial Sequence
  primer
ttgtacaagcccagactgtcc

SEQ ID NO: 109036 - DNA, 21 bp, Artificial Sequence
  primer
ggtccaaatagattccttggc

SEQ ID NO: 109037 - DNA, 37 bp, Artificial Sequence
  primer
gtaaaacgacggccagtaagcccgtcttcatttcagg

SEQ ID NO: 109038 - DNA, 19 bp, Artificial Sequence
  primer
tacctgaaagggctgtggc

SEQ ID NO: 109039 - DNA, 21 bp, Artificial Sequence
  primer
cttctgacggctggtctaagg

SEQ ID NO: 109040 - DNA, 21 bp, Artificial Sequence
  primer
tctggatctttgggaaaccag

SEQ ID NO: 109041 - DNA, 38 bp, Artificial Sequence
  primer
gtaaaacgacggccagttcaggcctcaattctacaccc

SEQ ID NO: 109042 - DNA, 21 bp, Artificial Sequence
  primer
cacttggtcagcctgtctctc

SEQ ID NO: 109043 - DNA, 21 bp, Artificial Sequence
  primer
gggaagagagaagggaagagg

SEQ ID NO: 109044 - DNA, 19 bp, Artificial Sequence
  primer
gcaatgcatgcaaatcctg

SEQ ID NO: 109045 - DNA, 20 bp, Artificial Sequence
  primer
agtggcgatgtatcacctgg

SEQ ID NO: 109046 - DNA, 21 bp, Artificial Sequence
  primer
tcccaaagagttgggtttgag

SEQ ID NO: 109047 - DNA, 21 bp, Artificial Sequence
  primer
aggaggaggtgtgttctccag

SEQ ID NO: 109048 - DNA, 21 bp, Artificial Sequence
  primer
gggagctctttgactctgatg

SEQ ID NO: 109049 - DNA, 21 bp, Artificial Sequence
  primer
gtgagtcccaaattcaccacc

SEQ ID NO: 109050 - DNA, 21 bp, Artificial Sequence
  primer
acagggatctggaaggctatg

SEQ ID NO: 109051 - DNA, 37 bp, Artificial Sequence
  primer
gtaaaacgacggccagtctctcctcctggagagcctg

SEQ ID NO: 109052 - DNA, 21 bp, Artificial Sequence
  primer
tcagtggtagggacagtggtg

SEQ ID NO: 109053 - DNA, 38 bp, Artificial Sequence
  primer
gtaaaacgacggccagtgagaccagagaggtaggctgg

SEQ ID NO: 109054 - DNA, 22 bp, Artificial Sequence
  primer
tgatgtttgaacagccactctc

SEQ ID NO: 109055 - DNA, 21 bp, Artificial Sequence
  primer
tgagcctcaggaaggtttgta

SEQ ID NO: 109056 - DNA, 38 bp, Artificial Sequence
  primer
gtaaaacgacggccagtatgtctatgtctgcctgtggg

SEQ ID NO: 109057 - DNA, 21 bp, Artificial Sequence
  primer
tggtcagggactgactcttcc

SEQ ID NO: 109058 - DNA, 21 bp, Artificial Sequence
  primer
ctgagtgtgttctgcgttctg

SEQ ID NO: 109059 - DNA, 21 bp, Artificial Sequence
  primer
gagtttaggtgagagggtggg

SEQ ID NO: 109060 - DNA, 21 bp, Artificial Sequence
  primer
ggttcaagctctcagccagac

SEQ ID NO: 109061 - DNA, 38 bp, Artificial Sequence
  primer
gtaaaacgacggccagtaaacacctgcagagagagcac

SEQ ID NO: 109062 - DNA, 38 bp, Artificial Sequence
  primer
gtaaaacgacggccagtaggctcacaaagatcagaggg

SEQ ID NO: 109063 - DNA, 21 bp, Artificial Sequence
  primer
aggtgagagagagaagggcag

SEQ ID NO: 109064 - DNA, 38 bp, Artificial Sequence
  primer
gtaaaacgacggccagtgagaggtaggctgggtgttcc

SEQ ID NO: 109065 - DNA, 22 bp, Artificial Sequence
  primer
cagccactctcttctggaattt

SEQ ID NO: 109066 - DNA, 21 bp, Artificial Sequence
  primer
aaggtttgcaccagcattagg

SEQ ID NO: 109067 - DNA, 21 bp, Artificial Sequence
  primer
tatgtctatggctgcctgtgg

SEQ ID NO: 109068 - DNA, 38 bp, Artificial Sequence
  primer
gtaaaacgacggccagtctgactcttcctttgtgtggc

SEQ ID NO: 109069 - DNA, 22 bp, Artificial Sequence
  primer
ggcttctgcaggattactaggg

SEQ ID NO: 109070 - DNA, 21 bp, Artificial Sequence
  primer
tcctgaaacaattccatcctg

SEQ ID NO: 109071 - DNA, 38 bp, Artificial Sequence
  primer
gtaaaacgacggccagtccctgcacatctcaaggaata

SEQ ID NO: 109072 - DNA, 38 bp, Artificial Sequence
  primer
gtaaaacgacggccagtagcaccagagccaggatagtt

SEQ ID NO: 109073 - DNA, 38 bp, Artificial Sequence
  primer
gtaaaacgacggccagtcacacctgaagatgccacata

SEQ ID NO: 109074 - DNA, 21 bp, Artificial Sequence
  primer
gaaagcaggacagaggcagac

SEQ ID NO: 109075 - DNA, 21 bp, Artificial Sequence
  primer
ccaagtttgaagtctccctcc

SEQ ID NO: 109076 - DNA, 21 bp, Artificial Sequence
  primer
tagtacacaggcccaggcttc

SEQ ID NO: 109077 - DNA, 21 bp, Artificial Sequence
  primer
gagcagctgagcttaggatgg

SEQ ID NO: 109078 - DNA, 38 bp, Artificial Sequence
  primer
gtaaaacgacggccagttgcagagcaccacctactctc

SEQ ID NO: 109079 - DNA, 21 bp, Artificial Sequence
  primer
ttaagcctccttgctaaagcc

SEQ ID NO: 109080 - DNA, 21 bp, Artificial Sequence
  primer
aaagcacagagtgtcactgcc

SEQ ID NO: 109081 - DNA, 21 bp, Artificial Sequence
  primer
agagctccttctgctgtcctg

SEQ ID NO: 109082 - DNA, 20 bp, Artificial Sequence
  primer
gatggttcaggacaggatgg

SEQ ID NO: 109083 - DNA, 38 bp, Artificial Sequence
  primer
gtaaaacgacggccagtgactaaaggcacagagggtgc

SEQ ID NO: 109084 - DNA, 21 bp, Artificial Sequence
  primer
ttaaacactcgccaggttctg

SEQ ID NO: 109085 - DNA, 21 bp, Artificial Sequence
  primer
tcatctatcccacccacttcc

SEQ ID NO: 109086 - DNA, 36 bp, Artificial Sequence
  primer
gtaaaacgacggccagtccaactcctccacacccag

SEQ ID NO: 109087 - DNA, 21 bp, Artificial Sequence
  primer
gagctgcctccctctcttctc

SEQ ID NO: 109088 - DNA, 21 bp, Artificial Sequence
  primer
ggaaagaggaacatggctgag

SEQ ID NO: 109089 - DNA, 38 bp, Artificial Sequence
  primer
gtaaaacgacggccagtctccacttgtcaccaccactc

SEQ ID NO: 109090 - DNA, 22 bp, Artificial Sequence
  primer
agatagggaaaccaaggctcag

SEQ ID NO: 109091 - DNA, 38 bp, Artificial Sequence
  primer
gtaaaacgacggccagtcaaagcccagctatgacacac

SEQ ID NO: 109092 - DNA, 38 bp, Artificial Sequence
  primer
gtaaaacgacggccagtcagtgccctttggatcaagtc

SEQ ID NO: 109093 - DNA, 38 bp, Artificial Sequence
  primer
gtaaaacgacggccagtgaggagagcacccaaactctg

SEQ ID NO: 109094 - DNA, 20 bp, Artificial Sequence
  primer
ttgcaccgattcccactaag

SEQ ID NO: 109095 - DNA, 21 bp, Artificial Sequence
  primer
aatgcctgtgggagagaagag

SEQ ID NO: 109096 - DNA, 38 bp, Artificial Sequence
  primer
gtaaaacgacggccagtggtctcccagttgtctccaag

SEQ ID NO: 109097 - DNA, 38 bp, Artificial Sequence
  primer
gtaaaacgacggccagttgaacagttgcccatgaactc

SEQ ID NO: 109098 - DNA, 21 bp, Artificial Sequence
  primer
ttcttagatcccaccagtccc

SEQ ID NO: 109099 - DNA, 21 bp, Artificial Sequence
  primer
cagccaccatcaatacctagc

SEQ ID NO: 109100 - DNA, 20 bp, Artificial Sequence
  primer
aaggagggacgtgggtactg

SEQ ID NO: 109101 - DNA, 21 bp, Artificial Sequence
  primer
ttgcactcttgttgaagatcg

SEQ ID NO: 109102 - DNA, 19 bp, Artificial Sequence
  primer
aggaagagcaatggcccag

SEQ ID NO: 109103 - DNA, 38 bp, Artificial Sequence
  primer
gtaaaacgacggccagttcgaccttcaaagcacagcta

SEQ ID NO: 109104 - DNA, 21 bp, Artificial Sequence
  primer
ccttccctttctcaagcatct

SEQ ID NO: 109105 - DNA, 38 bp, Artificial Sequence
  primer
gtaaaacgacggccagtaggtaagcttggcttcagcac

SEQ ID NO: 109106 - DNA, 19 bp, Artificial Sequence
  primer
cttggtatcaagccctgcc

SEQ ID NO: 109107 - DNA, 21 bp, Artificial Sequence
  primer
caggtaatgcctgtgggagag

SEQ ID NO: 109108 - DNA, 21 bp, Artificial Sequence
  primer
ggatttcctatgtccagcagc

SEQ ID NO: 109109 - DNA, 38 bp, Artificial Sequence
  primer
gtaaaacgacggccagtctgtgaaggaatggagggaag

SEQ ID NO: 109110 - DNA, 38 bp, Artificial Sequence
  primer
gtaaaacgacggccagtgtcaggttcttggtttcaggg

SEQ ID NO: 109111 - DNA, 21 bp, Artificial Sequence
  primer
aagtgagaagggcttgcgtag

SEQ ID NO: 109112 - DNA, 21 bp, Artificial Sequence
  primer
tagctgagagggaaggaaagg

SEQ ID NO: 109113 - DNA, 21 bp, Artificial Sequence
  primer
ctccacttgtcaccagcactc

SEQ ID NO: 109114 - DNA, 21 bp, Artificial Sequence
  primer
caaggctcagtgagaaagagc

SEQ ID NO: 109115 - DNA, 21 bp, Artificial Sequence
  primer
aaggtttgtctggtttccctg

SEQ ID NO: 109116 - DNA, 22 bp, Artificial Sequence
  primer
gctccctagtgccctcttaatc

SEQ ID NO: 109117 - DNA, 38 bp, Artificial Sequence
  primer
gtaaaacgacggccagtgaaggtagacagcacccatgc

SEQ ID NO: 109118 - DNA, 38 bp, Artificial Sequence
  primer
gtaaaacgacggccagtctgctcctattcccactaggc

SEQ ID NO: 109119 - DNA, 21 bp, Artificial Sequence
  primer
agagaagggagcagtcaggag

SEQ ID NO: 109120 - DNA, 21 bp, Artificial Sequence
  primer
cagccttggagagacagacag

SEQ ID NO: 109121 - DNA, 38 bp, Artificial Sequence
  primer
gtaaaacgacggccagtcagaggaggtgagggaaagag

SEQ ID NO: 109122 - DNA, 21 bp, Artificial Sequence
  primer
gcacaagcgtctttctgtttg

SEQ ID NO: 109123 - DNA, 21 bp, Artificial Sequence
  primer
ttggcacctcacagaaatgag

SEQ ID NO: 109124 - DNA, 38 bp, Artificial Sequence
  primer
gtaaaacgacggccagtagatggaagcagtggcatctc

SEQ ID NO: 109125 - DNA, 38 bp, Artificial Sequence
  primer
gtaaaacgacggccagtggcttcaggatgttgaaatgg

SEQ ID NO: 109126 - DNA, 21 bp, Artificial Sequence
  primer
ccttctgggcacctactatgc

SEQ ID NO: 109127 - DNA, 21 bp, Artificial Sequence
  primer
gatttccctgctcagtcctcc

SEQ ID NO: 109128 - DNA, 20 bp, Artificial Sequence
  primer
cccttcctcaatcaccttcc

SEQ ID NO: 109129 - DNA, 38 bp, Artificial Sequence
  primer
gtaaaacgacggccagttacagcaaccttgcattgagg

SEQ ID NO: 109130 - DNA, 38 bp, Artificial Sequence
  primer
gtaaaacgacggccagtcccactaagcaatagtggcag

SEQ ID NO: 109131 - DNA, 38 bp, Artificial Sequence
  primer
gtaaaacgacggccagtatgaggcagataatgcctgtg

SEQ ID NO: 109132 - DNA, 38 bp, Artificial Sequence
  primer
gtaaaacgacggccagtgggaggtgatgttggattctc

SEQ ID NO: 109133 - DNA, 38 bp, Artificial Sequence
  primer
gtaaaacgacggccagttcccataaactccagaggagg

SEQ ID NO: 109134 - DNA, 21 bp, Artificial Sequence
  primer
ggatggaatacaggactgtgg

SEQ ID NO: 109135 - DNA, 21 bp, Artificial Sequence
  primer
gagtgagtttctctgccgtcc

SEQ ID NO: 109136 - DNA, 20 bp, Artificial Sequence
  primer
gttcccagaacaacacggag

SEQ ID NO: 109137 - DNA, 38 bp, Artificial Sequence
  primer
gtaaaacgacggccagtcacttaacaagagcccatccc

SEQ ID NO: 109138 - DNA, 20 bp, Artificial Sequence
  primer
acccaggagagccaacattc

SEQ ID NO: 109139 - DNA, 22 bp, Artificial Sequence
  primer
tctcatcatctctccaggaagg

SEQ ID NO: 109140 - DNA, 38 bp, Artificial Sequence
  primer
gtaaaacgacggccagtagtccggtccttcaatctgac

SEQ ID NO: 109141 - DNA, 21 bp, Artificial Sequence
  primer
acattgaggctctcaggaagg

SEQ ID NO: 109142 - DNA, 21 bp, Artificial Sequence
  primer
attcccactaggcaacaatgg

SEQ ID NO: 109143 - DNA, 38 bp, Artificial Sequence
  primer
gtaaaacgacggccagttaagaacaaggtccgagctgc

SEQ ID NO: 109144 - DNA, 20 bp, Artificial Sequence
  primer
tgtgggtggagtagagaggg

SEQ ID NO: 109145 - DNA, 38 bp, Artificial Sequence
  primer
gtaaaacgacggccagtacgtggtcctacaagtcaggc

SEQ ID NO: 109146 - DNA, 20 bp, Artificial Sequence
  primer
tcacccagagaggcagtgag

SEQ ID NO: 109147 - DNA, 35 bp, Artificial Sequence
  primer
gtaaaacgacggccagtgttcctggctgatcggag

SEQ ID NO: 109148 - DNA, 21 bp, Artificial Sequence
  primer
tggaaagcattaaattgcacc

SEQ ID NO: 109149 - DNA, 21 bp, Artificial Sequence
  primer
tccagcctttctcctcctttc

SEQ ID NO: 109150 - DNA, 36 bp, Artificial Sequence
  primer
gtaaaacgacggccagtcttcccggtggagtgtgat

SEQ ID NO: 109151 - DNA, 25 bp, Artificial Sequence
  primer
aagatacaacgcagaaattgttagc

SEQ ID NO: 109152 - DNA, 20 bp, Artificial Sequence
  primer
ggctccatagtcctacaccg

SEQ ID NO: 109153 - DNA, 26 bp, Artificial Sequence
  primer
gaagaagttgagctggtacttaatca

SEQ ID NO: 109154 - DNA, 21 bp, Artificial Sequence
  primer
gggagccttcctgctcattac

SEQ ID NO: 109155 - DNA, 21 bp, Artificial Sequence
  primer
tgcaatgcatagggaatgatg

SEQ ID NO: 109156 - DNA, 21 bp, Artificial Sequence
  primer
ctgttgcatatgggcaatgtc

SEQ ID NO: 109157 - DNA, 21 bp, Artificial Sequence
  primer
tcaagatcagtgggatcaagg

SEQ ID NO: 109158 - DNA, 38 bp, Artificial Sequence
  primer
gtaaaacgacggccagtaagaaagctgcgtctctctgc

SEQ ID NO: 109159 - DNA, 38 bp, Artificial Sequence
  primer
gtaaaacgacggccagtgctttggaatcttgcctatgg

SEQ ID NO: 109160 - DNA, 21 bp, Artificial Sequence
  primer
gaagctttctgggaagtggtg

SEQ ID NO: 109161 - DNA, 22 bp, Artificial Sequence
  primer
caccatttggtacttggtttgc

SEQ ID NO: 109162 - DNA, 21 bp, Artificial Sequence
  primer
tttgcataaggatcatgggtg

SEQ ID NO: 109163 - DNA, 23 bp, Artificial Sequence
  primer
caagtcaaatttctttggagcag

SEQ ID NO: 109164 - DNA, 21 bp, Artificial Sequence
  primer
tcaaattgcatgaagctgctc

SEQ ID NO: 109165 - DNA, 21 bp, Artificial Sequence
  primer
agggtcactaaggtaccagcg

SEQ ID NO: 109166 - DNA, 38 bp, Artificial Sequence
  primer
gtaaaacgacggccagtgtgcctttgggaaagtcattg

SEQ ID NO: 109167 - DNA, 24 bp, Artificial Sequence
  primer
tttgtttaatttgtgtcatttccc

SEQ ID NO: 109168 - DNA, 38 bp, Artificial Sequence
  primer
gtaaaacgacggccagtttgaaggtggactgcattgag

SEQ ID NO: 109169 - DNA, 38 bp, Artificial Sequence
  primer
gtaaaacgacggccagtctcccaccatacattgatccc

SEQ ID NO: 109170 - DNA, 20 bp, Artificial Sequence
  primer
cccaccagtctgtgctgttt

SEQ ID NO: 109171 - DNA, 21 bp, Artificial Sequence
  primer
tgttgaggaggacatggaatc

SEQ ID NO: 109172 - DNA, 21 bp, Artificial Sequence
  primer
atccctgtgagaagtgttggg

SEQ ID NO: 109173 - DNA, 21 bp, Artificial Sequence
  primer
ttggccttgagagctgaattt

SEQ ID NO: 109174 - DNA, 22 bp, Artificial Sequence
  primer
gcagccataaccagagtcaatg

SEQ ID NO: 109175 - DNA, 37 bp, Artificial Sequence
  primer
gtaaaacgacggccagtaggtgctagtcactgtgccc

SEQ ID NO: 109176 - DNA, 40 bp, Artificial Sequence
  primer
gtaaaacgacggccagtcccttacctttccaaatgcatac

SEQ ID NO: 109177 - DNA, 22 bp, Artificial Sequence
  primer
aatcctgtgcctgtttggatag

SEQ ID NO: 109178 - DNA, 43 bp, Artificial Sequence
  primer
gtaaaacgacggccagtaaatgacagatcgttatcctaactgc

SEQ ID NO: 109179 - DNA, 39 bp, Artificial Sequence
  primer
gtaaaacgacggccagtgggtaccaactaaatgcactgg

SEQ ID NO: 109180 - DNA, 38 bp, Artificial Sequence
  primer
gtaaaacgacggccagtgtgggtttcaccagatacagc

SEQ ID NO: 109181 - DNA, 18 bp, Artificial Sequence
  primer
cttgccatccactgagcc

SEQ ID NO: 109182 - DNA, 22 bp, Artificial Sequence
  primer
tttcctcaatggtgtctcaaag

SEQ ID NO: 109183 - DNA, 38 bp, Artificial Sequence
  primer
gtaaaacgacggccagtaccatgcctggctgtttctac

SEQ ID NO: 109184 - DNA, 22 bp, Artificial Sequence
  primer
gcaatacttaacttgcagccca

SEQ ID NO: 109185 - DNA, 40 bp, Artificial Sequence
  primer
gtaaaacgacggccagtttgttaaggcaaagcataccaac

SEQ ID NO: 109186 - DNA, 22 bp, Artificial Sequence
  primer
tccaaagatcacagctaccaac

SEQ ID NO: 109187 - DNA, 26 bp, Artificial Sequence
  primer
tttaggtaaggttatagggaatttgc

SEQ ID NO: 109188 - DNA, 39 bp, Artificial Sequence
  primer
gtaaaacgacggccagtcaccacacccacctatttcttc

SEQ ID NO: 109189 - DNA, 38 bp, Artificial Sequence
  primer
gtaaaacgacggccagttccctatgaggaaagggagag

SEQ ID NO: 109190 - DNA, 25 bp, Artificial Sequence
  primer
tttgatagaaccattcagttaacaa

SEQ ID NO: 109191 - DNA, 23 bp, Artificial Sequence
  primer
gggaagctgtcatatgtcttgtg

SEQ ID NO: 109192 - DNA, 26 bp, Artificial Sequence
  primer
tccacataaggataactctcttcaac

SEQ ID NO: 109193 - DNA, 21 bp, Artificial Sequence
  primer
gttctcgtgcctcaagctctc

SEQ ID NO: 109194 - DNA, 39 bp, Artificial Sequence
  primer
gtaaaacgacggccagtaatggatatggcgttagtcacc

SEQ ID NO: 109195 - DNA, 37 bp, Artificial Sequence
  primer
gtaaaacgacggccagtagcacatacaagctccgtgg

SEQ ID NO: 109196 - DNA, 22 bp, Artificial Sequence
  primer
aggtgtcagtttcctcacttgg

SEQ ID NO: 109197 - DNA, 42 bp, Artificial Sequence
  primer
gtaaaacgacggccagtcaattaagcagacaattcctgtgac

SEQ ID NO: 109198 - DNA, 21 bp, Artificial Sequence
  primer
tttgtccaaagggactgtgtg

SEQ ID NO: 109199 - DNA, 37 bp, Artificial Sequence
  primer
gtaaaacgacggccagtgcactggaaatcatggaggg

SEQ ID NO: 109200 - DNA, 38 bp, Artificial Sequence
  primer
gtaaaacgacggccagtgatggctggaaagaagggttc

SEQ ID NO: 109201 - DNA, 21 bp, Artificial Sequence
  primer
tggatacagttctgccgtgtc

SEQ ID NO: 109202 - DNA, 21 bp, Artificial Sequence
  primer
cctatttcaaggtcctcgtgc

SEQ ID NO: 109203 - DNA, 25 bp, Artificial Sequence
  primer
gtgctcattcagaagttcttacctc

SEQ ID NO: 109204 - DNA, 21 bp, Artificial Sequence
  primer
ggcagctgtgtcctctacctc

SEQ ID NO: 109205 - DNA, 38 bp, Artificial Sequence
  primer
gtaaaacgacggccagtgaccaaagtggcaagaggaag

SEQ ID NO: 109206 - DNA, 27 bp, Artificial Sequence
  primer
tgatatcagatcaaatagaaattagcg

SEQ ID NO: 109207 - DNA, 21 bp, Artificial Sequence
  primer
tgtgtgtccttgaggatggag

SEQ ID NO: 109208 - DNA, 38 bp, Artificial Sequence
  primer
gtaaaacgacggccagtgctccttgtccttcgtgtagc

SEQ ID NO: 109209 - DNA, 21 bp, Artificial Sequence
  primer
cgaatagcttctgggtgcttc

SEQ ID NO: 109210 - DNA, 21 bp, Artificial Sequence
  primer
ctgccattagggttgaggaag

SEQ ID NO: 109211 - DNA, 38 bp, Artificial Sequence
  primer
gtaaaacgacggccagtttggccaagctcactctgtag

SEQ ID NO: 109212 - DNA, 38 bp, Artificial Sequence
  primer
gtaaaacgacggccagtacaggcagaacagaggtaggg

SEQ ID NO: 109213 - DNA, 40 bp, Artificial Sequence
  primer
gtaaaacgacggccagtgagtgcttaaagaaacggctacc

SEQ ID NO: 109214 - DNA, 21 bp, Artificial Sequence
  primer
tgaaatcatgtgcctttctgc

SEQ ID NO: 109215 - DNA, 39 bp, Artificial Sequence
  primer
gtaaaacgacggccagttgctcagtctccacttaccagg

SEQ ID NO: 109216 - DNA, 38 bp, Artificial Sequence
  primer
gtaaaacgacggccagtacaggctcaagcactcatttc

SEQ ID NO: 109217 - DNA, 21 bp, Artificial Sequence
  primer
ttggtcttgctgcatttcttg

SEQ ID NO: 109218 - DNA, 38 bp, Artificial Sequence
  primer
gtaaaacgacggccagtaatgagtcccatcacccacac

SEQ ID NO: 109219 - DNA, 21 bp, Artificial Sequence
  primer
tagggctttgcatttagaggg

SEQ ID NO: 109220 - DNA, 21 bp, Artificial Sequence
  primer
agctttgaatatccgggagtg

SEQ ID NO: 109221 - DNA, 21 bp, Artificial Sequence
  primer
acaaagcataggtgctgaggc

SEQ ID NO: 109222 - DNA, 22 bp, Artificial Sequence
  primer
ggtttggccattagaaatggag

SEQ ID NO: 109223 - DNA, 39 bp, Artificial Sequence
  primer
gtaaaacgacggccagtcaaggttatgaccacggacttc

SEQ ID NO: 109224 - DNA, 41 bp, Artificial Sequence
  primer
gtaaaacgacggccagtgccttctttctgggtacataagtc

SEQ ID NO: 109225 - DNA, 43 bp, Artificial Sequence
  primer
gtaaaacgacggccagttgagatagagttgtaggcccaaatag

SEQ ID NO: 109226 - DNA, 38 bp, Artificial Sequence
  primer
gtaaaacgacggccagtaggccaggtctccaaatatcc

SEQ ID NO: 109227 - DNA, 21 bp, Artificial Sequence
  primer
atgatcccacagaggatccag

SEQ ID NO: 109228 - DNA, 38 bp, Artificial Sequence
  primer
gtaaaacgacggccagtaaacccactttccatgtcgtc

SEQ ID NO: 109229 - DNA, 39 bp, Artificial Sequence
  primer
gtaaaacgacggccagttcaacatttgttgggagtgatg

SEQ ID NO: 109230 - DNA, 21 bp, Artificial Sequence
  primer
tttgaagaaagcaaaccattg

SEQ ID NO: 109231 - DNA, 21 bp, Artificial Sequence
  primer
gcaagaggaacagggactgag

SEQ ID NO: 109232 - DNA, 38 bp, Artificial Sequence
  primer
gtaaaacgacggccagtttccttgtcaccatctcctcc

SEQ ID NO: 109233 - DNA, 21 bp, Artificial Sequence
  primer
ttcctgggtaggaataccagc

SEQ ID NO: 109234 - DNA, 38 bp, Artificial Sequence
  primer
gtaaaacgacggccagtgtccagctcaacccacgttag

SEQ ID NO: 109235 - DNA, 21 bp, Artificial Sequence
  primer
ttgaaatctcttgcccacaac

SEQ ID NO: 109236 - DNA, 41 bp, Artificial Sequence
  primer
gtaaaacgacggccagttcattgaccatctagaatgtttcc

SEQ ID NO: 109237 - DNA, 21 bp, Artificial Sequence
  primer
ccttggagcaattctttcctg

SEQ ID NO: 109238 - DNA, 37 bp, Artificial Sequence
  primer
gtaaaacgacggccagttcagatggcccaaacttcag

SEQ ID NO: 109239 - DNA, 19 bp, Artificial Sequence
  primer
ccaaatgtcccagggtgag

SEQ ID NO: 109240 - DNA, 37 bp, Artificial Sequence
  primer
gtaaaacgacggccagttgagccaagtcttcaggtgg

SEQ ID NO: 109241 - DNA, 22 bp, Artificial Sequence
  primer
cggcagaaagtatgtttgaagg

SEQ ID NO: 109242 - DNA, 38 bp, Artificial Sequence
  primer
gtaaaacgacggccagttgttagaatctgccatcaggg

SEQ ID NO: 109243 - DNA, 38 bp, Artificial Sequence
  primer
gtaaaacgacggccagtattgtctacatgcggcctgac

SEQ ID NO: 109244 - DNA, 35 bp, Artificial Sequence
  primer
gtaaaacgacggccagtggaggttccacagggctc

SEQ ID NO: 109245 - DNA, 21 bp, Artificial Sequence
  primer
caacaagagcgaaactccgac

SEQ ID NO: 109246 - DNA, 38 bp, Artificial Sequence
  primer
gtaaaacgacggccagtctaagcacccacagacaccag

SEQ ID NO: 109247 - DNA, 21 bp, Artificial Sequence
  primer
tcagagactggacaaagctgc

SEQ ID NO: 109248 - DNA, 21 bp, Artificial Sequence
  primer
aggctgacatctccttatggc

SEQ ID NO: 109249 - DNA, 38 bp, Artificial Sequence
  primer
gtaaaacgacggccagtcccaccacttactccttggtc

SEQ ID NO: 109250 - DNA, 21 bp, Artificial Sequence
  primer
cacaatcgtctcaaagatgcc

SEQ ID NO: 109251 - DNA, 21 bp, Artificial Sequence
  primer
tatgctgaggatggactgtgg

SEQ ID NO: 109252 - DNA, 21 bp, Artificial Sequence
  primer
tccctccttcaaagctaaccc

SEQ ID NO: 109253 - DNA, 20 bp, Artificial Sequence
  primer
gacggtctcagggtcctagc

SEQ ID NO: 109254 - DNA, 21 bp, Artificial Sequence
  primer
actccacgtgctatgagaccc

SEQ ID NO: 109255 - DNA, 20 bp, Artificial Sequence
  primer
agaggcctacaggagggatg

SEQ ID NO: 109256 - DNA, 20 bp, Artificial Sequence
  primer
ctggcacaggagttctggag

SEQ ID NO: 109257 - DNA, 21 bp, Artificial Sequence
  primer
ggtggagttgctgatctttcc

SEQ ID NO: 109258 - DNA, 40 bp, Artificial Sequence
  primer
gtaaaacgacggccagtcatgctaaaccagattggtcatc

SEQ ID NO: 109259 - DNA, 40 bp, Artificial Sequence
  primer
gtaaaacgacggccagttttctccctcaaatagggaaatc

SEQ ID NO: 109260 - DNA, 21 bp, Artificial Sequence
  primer
tttgggttggcttctatctgc

SEQ ID NO: 109261 - DNA, 38 bp, Artificial Sequence
  primer
gtaaaacgacggccagtgaagtgggcataagccttcag

SEQ ID NO: 109262 - DNA, 41 bp, Artificial Sequence
  primer
gtaaaacgacggccagtccagtgaacaggttcatctacatc

SEQ ID NO: 109263 - DNA, 22 bp, Artificial Sequence
  primer
tgcatgacttaaccgattcctt

SEQ ID NO: 109264 - DNA, 37 bp, Artificial Sequence
  primer
gtaaaacgacggccagtaacgggaccatgtgcattag

SEQ ID NO: 109265 - DNA, 20 bp, Artificial Sequence
  primer
gggtcactttcctggtcaag

SEQ ID NO: 109266 - DNA, 22 bp, Artificial Sequence
  primer
gttggagacaaagtgaacatgg

SEQ ID NO: 109267 - DNA, 21 bp, Artificial Sequence
  primer
aagtggagcaggaaccatgtc

SEQ ID NO: 109268 - DNA, 38 bp, Artificial Sequence
  primer
gtaaaacgacggccagttgtaaggaattcccaaggcac

SEQ ID NO: 109269 - DNA, 41 bp, Artificial Sequence
  primer
gtaaaacgacggccagtgatgcactagtccaagaaatccag

SEQ ID NO: 109270 - DNA, 21 bp, Artificial Sequence
  primer
tatcatctaaggcagggctcc

SEQ ID NO: 109271 - DNA, 21 bp, Artificial Sequence
  primer
caggcagtcacaagctactgg

SEQ ID NO: 109272 - DNA, 37 bp, Artificial Sequence
  primer
gtaaaacgacggccagtctgctgctctaaggcctgtc

SEQ ID NO: 109273 - DNA, 21 bp, Artificial Sequence
  primer
gaagcaattgcaccgtaaatg

SEQ ID NO: 109274 - DNA, 38 bp, Artificial Sequence
  primer
gtaaaacgacggccagttcatcacccgcttccagttag

SEQ ID NO: 109275 - DNA, 38 bp, Artificial Sequence
  primer
gtaaaacgacggccagtcccatagcgttgctggtactc

SEQ ID NO: 109276 - DNA, 38 bp, Artificial Sequence
  primer
gtaaaacgacggccagtggcactgcacaagtggtaatg

SEQ ID NO: 109277 - DNA, 38 bp, Artificial Sequence
  primer
gtaaaacgacggccagtgccagagtttctccgaatgac

SEQ ID NO: 109278 - DNA, 39 bp, Artificial Sequence
  primer
gtaaaacgacggccagtccaactcattcacatcctctcc

SEQ ID NO: 109279 - DNA, 38 bp, Artificial Sequence
  primer
gtaaaacgacggccagtatgtagcaccacagccacaac

SEQ ID NO: 109280 - DNA, 38 bp, Artificial Sequence
  primer
gtaaaacgacggccagtcactttgccaagtatccctcc

SEQ ID NO: 109281 - DNA, 27 bp, Artificial Sequence
  primer
agacttcctagaaggtttgactattgc

SEQ ID NO: 109282 - DNA, 38 bp, Artificial Sequence
  primer
gtaaaacgacggccagttcaccacaagaggacatctca

SEQ ID NO: 109283 - DNA, 43 bp, Artificial Sequence
  primer
gtaaaacgacggccagtcatagcgaagatgaagtctaaagtcc

SEQ ID NO: 109284 - DNA, 37 bp, Artificial Sequence
  primer
gtaaaacgacggccagtacaggccagcacttgatgag

SEQ ID NO: 109285 - DNA, 38 bp, Artificial Sequence
  primer
gtaaaacgacggccagtggttgccctaaagtccatgtg

SEQ ID NO: 109286 - DNA, 20 bp, Artificial Sequence
  primer
caggagccagaacccattag

SEQ ID NO: 109287 - DNA, 38 bp, Artificial Sequence
  primer
gtaaaacgacggccagtgaacatttcagctctcccagc

SEQ ID NO: 109288 - DNA, 20 bp, Artificial Sequence
  primer
gcctgcaccaagctaacaag

SEQ ID NO: 109289 - DNA, 23 bp, Artificial Sequence
  primer
gatagcagagggagtgagtctcc

SEQ ID NO: 109290 - DNA, 41 bp, Artificial Sequence
  primer
gtaaaacgacggccagttgagctagtgagaactcttggtcc

SEQ ID NO: 109291 - DNA, 21 bp, Artificial Sequence
  primer
tgcacagggtagatccaacag

SEQ ID NO: 109292 - DNA, 41 bp, Artificial Sequence
  primer
gtaaaacgacggccagtcctggataacgaagagatttcaag

SEQ ID NO: 109293 - DNA, 38 bp, Artificial Sequence
  primer
gtaaaacgacggccagtgagaaagaaggcatccagctc

SEQ ID NO: 109294 - DNA, 37 bp, Artificial Sequence
  primer
gtaaaacgacggccagttggttcagcctcctcaattc

SEQ ID NO: 109295 - DNA, 38 bp, Artificial Sequence
  primer
gtaaaacgacggccagtaattggcccaaacaattcaac

SEQ ID NO: 109296 - DNA, 20 bp, Artificial Sequence
  primer
caactgtgcaagactccgtc

SEQ ID NO: 109297 - DNA, 21 bp, Artificial Sequence
  primer
agaatgcagtgtcatgaaggc

SEQ ID NO: 109298 - DNA, 22 bp, Artificial Sequence
  primer
tgcagtgcaaactacctcaatg

SEQ ID NO: 109299 - DNA, 21 bp, Artificial Sequence
  primer
aacctgcctttgcttcttgtg

SEQ ID NO: 109300 - DNA, 21 bp, Artificial Sequence
  primer
gcaccacgaagtttggatctc

SEQ ID NO: 109301 - DNA, 21 bp, Artificial Sequence
  primer
acattgaagccttccttcctg

SEQ ID NO: 109302 - DNA, 21 bp, Artificial Sequence
  primer
gcaaggcagtgtaatgaaacg

SEQ ID NO: 109303 - DNA, 21 bp, Artificial Sequence
  primer
acatagctgaggtgtcctggg

SEQ ID NO: 109304 - DNA, 21 bp, Artificial Sequence
  primer
cactgttgttcctccaacacc

SEQ ID NO: 109305 - DNA, 21 bp, Artificial Sequence
  primer
actggaaagctgctgaactcc

SEQ ID NO: 109306 - DNA, 21 bp, Artificial Sequence
  primer
gggaagtgaagtcaggtgagg

SEQ ID NO: 109307 - DNA, 38 bp, Artificial Sequence
  primer
gtaaaacgacggccagtctgctgcaaagaatcttcagg

SEQ ID NO: 109308 - DNA, 21 bp, Artificial Sequence
  primer
agccctcccaggtttaatagc

SEQ ID NO: 109309 - DNA, 21 bp, Artificial Sequence
  primer
cacaaaggtcccaactatccc

SEQ ID NO: 109310 - DNA, 37 bp, Artificial Sequence
  primer
gtaaaacgacggccagtgactgatcacaggacctggc

SEQ ID NO: 109311 - DNA, 38 bp, Artificial Sequence
  primer
gtaaaacgacggccagtaaagcaagtgcacagggagac

SEQ ID NO: 109312 - DNA, 20 bp, Artificial Sequence
  primer
cgaaagggagctgaggtttc

SEQ ID NO: 109313 - DNA, 21 bp, Artificial Sequence
  primer
gctcacaagctccatgtgttc

SEQ ID NO: 109314 - DNA, 38 bp, Artificial Sequence
  primer
gtaaaacgacggccagtacctgtacagcctcaagggtc

SEQ ID NO: 109315 - DNA, 23 bp, Artificial Sequence
  primer
gagtggagatctgtaaacaaggg

SEQ ID NO: 109316 - DNA, 19 bp, Artificial Sequence
  primer
aaaggaaaggaaggcaggc

SEQ ID NO: 109317 - DNA, 21 bp, Artificial Sequence
  primer
acagttccagatcaatgcctg

SEQ ID NO: 109318 - DNA, 21 bp, Artificial Sequence
  primer
agatgggagaatgactcctgg

SEQ ID NO: 109319 - DNA, 38 bp, Artificial Sequence
  primer
gtaaaacgacggccagtagccagctccagtctcctctc

SEQ ID NO: 109320 - DNA, 22 bp, Artificial Sequence
  primer
aaggaacatgtcacaaggttgg

SEQ ID NO: 109321 - DNA, 22 bp, Artificial Sequence
  primer
ccgtcctaatagagggaggatg

SEQ ID NO: 109322 - DNA, 39 bp, Artificial Sequence
  primer
gtaaaacgacggccagtgacaagaaccgaggtctcacac

SEQ ID NO: 109323 - DNA, 20 bp, Artificial Sequence
  primer
gagcttagggtgcagtgacg

SEQ ID NO: 109324 - DNA, 21 bp, Artificial Sequence
  primer
tgtctgtggtaggaatgggtg

SEQ ID NO: 109325 - DNA, 21 bp, Artificial Sequence
  primer
tggtgttcctcagttcctcag

SEQ ID NO: 109326 - DNA, 38 bp, Artificial Sequence
  primer
gtaaaacgacggccagtccaaggctctaaaccaagcac

SEQ ID NO: 109327 - DNA, 25 bp, Artificial Sequence
  primer
tttatctggagaataatgatgaacc

SEQ ID NO: 109328 - DNA, 23 bp, Artificial Sequence
  primer
tggtgattcaacagtaagccaag

SEQ ID NO: 109329 - DNA, 38 bp, Artificial Sequence
  primer
gtaaaacgacggccagtttcctgcccagagagtagagg

SEQ ID NO: 109330 - DNA, 38 bp, Artificial Sequence
  primer
gtaaaacgacggccagtctcaaagaccaacggagtcac

SEQ ID NO: 109331 - DNA, 38 bp, Artificial Sequence
  primer
gtaaaacgacggccagtcaggaagagaaggcctgactg

SEQ ID NO: 109332 - DNA, 38 bp, Artificial Sequence
  primer
gtaaaacgacggccagtgcagtcagtggattcttcagg

SEQ ID NO: 109333 - DNA, 21 bp, Artificial Sequence
  primer
aacaagccaggaatgaccaac

SEQ ID NO: 109334 - DNA, 21 bp, Artificial Sequence
  primer
cctcatgtctccttcctctgg

SEQ ID NO: 109335 - DNA, 21 bp, Artificial Sequence
  primer
tcaacactgaaatccaccagc

SEQ ID NO: 109336 - DNA, 21 bp, Artificial Sequence
  primer
tttatcatcattcggtggctg

SEQ ID NO: 109337 - DNA, 21 bp, Artificial Sequence
  primer
tccttaaacgtttctttgccc

SEQ ID NO: 109338 - DNA, 21 bp, Artificial Sequence
  primer
tccagacatgagttacggctc

SEQ ID NO: 109339 - DNA, 20 bp, Artificial Sequence
  primer
gcaacggcatttagaggatg

SEQ ID NO: 109340 - DNA, 38 bp, Artificial Sequence
  primer
gtaaaacgacggccagtgacatggtgcaaacattgagg

SEQ ID NO: 109341 - DNA, 21 bp, Artificial Sequence
  primer
tgggtataatcgcaggtttcc

SEQ ID NO: 109342 - DNA, 21 bp, Artificial Sequence
  primer
tgcaaacactcacggtttctc

SEQ ID NO: 109343 - DNA, 21 bp, Artificial Sequence
  primer
gggagccgaaattcaagtagc

SEQ ID NO: 109344 - DNA, 24 bp, Artificial Sequence
  primer
gccctcttacatccaattatttcc

SEQ ID NO: 109345 - DNA, 38 bp, Artificial Sequence
  primer
gtaaaacgacggccagttgattctccttgcttcagacg

SEQ ID NO: 109346 - DNA, 21 bp, Artificial Sequence
  primer
attagggcctcactcccattc

SEQ ID NO: 109347 - DNA, 24 bp, Artificial Sequence
  primer
tcaaagcaaatctatcttgtccac

SEQ ID NO: 109348 - DNA, 41 bp, Artificial Sequence
  primer
gtaaaacgacggccagttgcttaagatttctggttattgcc

SEQ ID NO: 109349 - DNA, 38 bp, Artificial Sequence
  primer
gtaaaacgacggccagtccagtccggttagagatctgg

SEQ ID NO: 109350 - DNA, 21 bp, Artificial Sequence
  primer
agagagcttgcatcacaccac

SEQ ID NO: 109351 - DNA, 39 bp, Artificial Sequence
  primer
gtaaaacgacggccagttgggagtatgaaatctcttccg

SEQ ID NO: 109352 - DNA, 21 bp, Artificial Sequence
  primer
gtgggtctaaggcagtgaagg

SEQ ID NO: 109353 - DNA, 38 bp, Artificial Sequence
  primer
gtaaaacgacggccagttccatgtggcagtggagatag

SEQ ID NO: 109354 - DNA, 37 bp, Artificial Sequence
  primer
gtaaaacgacggccagtgtgggagagggttcatttgg

SEQ ID NO: 109355 - DNA, 39 bp, Artificial Sequence
  primer
gtaaaacgacggccagtaagcaaggttaattcaggaggc

SEQ ID NO: 109356 - DNA, 39 bp, Artificial Sequence
  primer
gtaaaacgacggccagtttctattcttaagtgcccagcc

SEQ ID NO: 109357 - DNA, 21 bp, Artificial Sequence
  primer
cagcccacaccacagagatag

SEQ ID NO: 109358 - DNA, 21 bp, Artificial Sequence
  primer
gtttctgaactcgccgttctc

SEQ ID NO: 109359 - DNA, 38 bp, Artificial Sequence
  primer
gtaaaacgacggccagtaagtctaacatcctccagggc

SEQ ID NO: 109360 - DNA, 38 bp, Artificial Sequence
  primer
gtaaaacgacggccagtggaggatgtctggaggagacc

SEQ ID NO: 109361 - DNA, 21 bp, Artificial Sequence
  primer
cagcccacaccacagagatag

SEQ ID NO: 109362 - DNA, 21 bp, Artificial Sequence
  primer
gggtaccacttctccacgaac

SEQ ID NO: 109363 - DNA, 38 bp, Artificial Sequence
  primer
gtaaaacgacggccagtatgtacggatgtgaggaaggg

SEQ ID NO: 109364 - DNA, 38 bp, Artificial Sequence
  primer
gtaaaacgacggccagtccacttcgcagttctcatctg

SEQ ID NO: 109365 - DNA, 22 bp, Artificial Sequence
  primer
ggcaagtcagtacaactcaggg

SEQ ID NO: 109366 - DNA, 21 bp, Artificial Sequence
  primer
agggcctgtttatggtctctg

SEQ ID NO: 109367 - DNA, 38 bp, Artificial Sequence
  primer
gtaaaacgacggccagttccatggttactctggaaggg

SEQ ID NO: 109368 - DNA, 39 bp, Artificial Sequence
  primer
gtaaaacgacggccagtctatgtaggcatcctctttccc

SEQ ID NO: 109369 - DNA, 37 bp, Artificial Sequence
  primer
gtaaaacgacggccagtaactcctcgctgttgctgtg

SEQ ID NO: 109370 - DNA, 19 bp, Artificial Sequence
  primer
gctggtcgatcctcctctg

SEQ ID NO: 109371 - DNA, 38 bp, Artificial Sequence
  primer
gtaaaacgacggccagtgagaggaggagcatggtatgg

SEQ ID NO: 109372 - DNA, 22 bp, Artificial Sequence
  primer
tgctaatccatccctcttgttg

SEQ ID NO: 109373 - DNA, 38 bp, Artificial Sequence
  primer
gtaaaacgacggccagtcagcttatcctttgaggaggc

SEQ ID NO: 109374 - DNA, 21 bp, Artificial Sequence
  primer
ctcagggcagattctggtttc

SEQ ID NO: 109375 - DNA, 37 bp, Artificial Sequence
  primer
gtaaaacgacggccagtgctgcttcagtctctggtgg

SEQ ID NO: 109376 - DNA, 21 bp, Artificial Sequence
  primer
gggttgagtacacgggtttcc

SEQ ID NO: 109377 - DNA, 21 bp, Artificial Sequence
  primer
atgcgaacttgttccacattg

SEQ ID NO: 109378 - DNA, 38 bp, Artificial Sequence
  primer
gtaaaacgacggccagtgtgaggtgccaacttctcagg

SEQ ID NO: 109379 - DNA, 25 bp, Artificial Sequence
  primer
gatgtgtgtaaatatcgatgtcacc

SEQ ID NO: 109380 - DNA, 25 bp, Artificial Sequence
  primer
gaagttgcagacataaagttgatcc

SEQ ID NO: 109381 - DNA, 23 bp, Artificial Sequence
  primer
ccctagcctgcctaagtaatgtg

SEQ ID NO: 109382 - DNA, 37 bp, Artificial Sequence
  primer
gtaaaacgacggccagttttggaatgagggcatgttg

SEQ ID NO: 109383 - DNA, 21 bp, Artificial Sequence
  primer
aagtgcagcaggtcttcattc

SEQ ID NO: 109384 - DNA, 27 bp, Artificial Sequence
  primer
tcagtcagtctaatgggattaagtagg

SEQ ID NO: 109385 - DNA, 39 bp, Artificial Sequence
  primer
gtaaaacgacggccagtgcctaggattcaaattctgctc

SEQ ID NO: 109386 - DNA, 36 bp, Artificial Sequence
  primer
gtaaaacgacggccagtccaccctgctttcagcttc

SEQ ID NO: 109387 - DNA, 39 bp, Artificial Sequence
  primer
gtaaaacgacggccagtgctacatgcttgaatagcaggc

SEQ ID NO: 109388 - DNA, 22 bp, Artificial Sequence
  primer
tctggtatgaaccacaggtgaa

SEQ ID NO: 109389 - DNA, 38 bp, Artificial Sequence
  primer
gtaaaacgacggccagtgaagtgggagagccaagaaac

SEQ ID NO: 109390 - DNA, 38 bp, Artificial Sequence
  primer
gtaaaacgacggccagtaacaaagttggatgagggtgg

SEQ ID NO: 109391 - DNA, 22 bp, Artificial Sequence
  primer
gcagcctttctctaacttctgc

SEQ ID NO: 109392 - DNA, 21 bp, Artificial Sequence
  primer
aagctctgaaggacaaggcag

SEQ ID NO: 109393 - DNA, 21 bp, Artificial Sequence
  primer
atcctcatcccacctctctcc

SEQ ID NO: 109394 - DNA, 22 bp, Artificial Sequence
  primer
ccagccaaaggtttctagtagg

SEQ ID NO: 109395 - DNA, 20 bp, Artificial Sequence
  primer
tggcaggcctagtcacaaac

SEQ ID NO: 109396 - DNA, 38 bp, Artificial Sequence
  primer
gtaaaacgacggccagtttaaggaggtatcagcttccc

SEQ ID NO: 109397 - DNA, 22 bp, Artificial Sequence
  primer
ccctgtcaaggtacaggaaatg

SEQ ID NO: 109398 - DNA, 18 bp, Artificial Sequence
  primer
gacctcgtgatcctcccg

SEQ ID NO: 109399 - DNA, 38 bp, Artificial Sequence
  primer
gtaaaacgacggccagttctcccttcctttctttctgc

SEQ ID NO: 109400 - DNA, 21 bp, Artificial Sequence
  primer
ctgcaaattgcttcctgtgtc

SEQ ID NO: 109401 - DNA, 44 bp, Artificial Sequence
  primer
gtaaaacgacggccagtttaaatagctccttcagtaaacaaagc

SEQ ID NO: 109402 - DNA, 19 bp, Artificial Sequence
  primer
cccagccagagtcaacctc

SEQ ID NO: 109403 - DNA, 22 bp, Artificial Sequence
  primer
tctgggaatgttaaccacaagg

SEQ ID NO: 109404 - DNA, 37 bp, Artificial Sequence
  primer
gtaaaacgacggccagttttccaccagtgaaaggtgc

SEQ ID NO: 109405 - DNA, 21 bp, Artificial Sequence
  primer
cactgttgccctgtgagacac

SEQ ID NO: 109406 - DNA, 38 bp, Artificial Sequence
  primer
gtaaaacgacggccagttacaactttgttctcctgcgg

SEQ ID NO: 109407 - DNA, 21 bp, Artificial Sequence
  primer
aagtcatctgggaagcgacac

SEQ ID NO: 109408 - DNA, 21 bp, Artificial Sequence
  primer
gtcagttcgcttgtgcttagg

SEQ ID NO: 109409 - DNA, 38 bp, Artificial Sequence
  primer
gtaaaacgacggccagtgagtctggacaaactgggacc

SEQ ID NO: 109410 - DNA, 38 bp, Artificial Sequence
  primer
gtaaaacgacggccagtatgatgtcactcaaaccgtcg

SEQ ID NO: 109411 - DNA, 40 bp, Artificial Sequence
  primer
gtaaaacgacggccagtgcatccatacgtgaagatgaaac

SEQ ID NO: 109412 - DNA, 38 bp, Artificial Sequence
  primer
gtaaaacgacggccagtagagggtggactcagaacagg

SEQ ID NO: 109413 - DNA, 37 bp, Artificial Sequence
  primer
gtaaaacgacggccagtggactcacggtctccgaatc

SEQ ID NO: 109414 - DNA, 38 bp, Artificial Sequence
  primer
gtaaaacgacggccagtctgcggatcttcttcttcagg

SEQ ID NO: 109415 - DNA, 38 bp, Artificial Sequence
  primer
gtaaaacgacggccagtctgaaacccagacatgcacag

SEQ ID NO: 109416 - DNA, 19 bp, Artificial Sequence
  primer
ggcaatgcaggctcttctc

SEQ ID NO: 109417 - DNA, 38 bp, Artificial Sequence
  primer
gtaaaacgacggccagtaaaccagtcccatccaatttc

SEQ ID NO: 109418 - DNA, 38 bp, Artificial Sequence
  primer
gtaaaacgacggccagtgtggctgtccctcttctaagg

SEQ ID NO: 109419 - DNA, 21 bp, Artificial Sequence
  primer
gaggtcaatcctttgctttgg

SEQ ID NO: 109420 - DNA, 38 bp, Artificial Sequence
  primer
gtaaaacgacggccagttacaccatgaatgtcaggcac

SEQ ID NO: 109421 - DNA, 38 bp, Artificial Sequence
  primer
gtaaaacgacggccagtagcttctgacacccgagtagg

SEQ ID NO: 109422 - DNA, 21 bp, Artificial Sequence
  primer
tggtggtgcgaatacgagtag

SEQ ID NO: 109423 - DNA, 21 bp, Artificial Sequence
  primer
gtggcatgcatgaaatactcg

SEQ ID NO: 109424 - DNA, 21 bp, Artificial Sequence
  primer
gcttgtggccttaaagtcagg

SEQ ID NO: 109425 - DNA, 21 bp, Artificial Sequence
  primer
tccagttcgtctgcaaagatg

SEQ ID NO: 109426 - DNA, 21 bp, Artificial Sequence
  primer
aaggtgggacatagggaggag

SEQ ID NO: 109427 - DNA, 21 bp, Artificial Sequence
  primer
aagtctctccagctgctttgg

SEQ ID NO: 109428 - DNA, 39 bp, Artificial Sequence
  primer
gtaaaacgacggccagtgacaggtgctgagactgacaag

SEQ ID NO: 109429 - DNA, 38 bp, Artificial Sequence
  primer
gtaaaacgacggccagtcaacatgtacaaccaggcagc

SEQ ID NO: 109430 - DNA, 21 bp, Artificial Sequence
  primer
tacatgccctctcaagtccag

SEQ ID NO: 109431 - DNA, 20 bp, Artificial Sequence
  primer
gcagggtcctgggtaaagag

SEQ ID NO: 109432 - DNA, 38 bp, Artificial Sequence
  primer
gtaaaacgacggccagtcatctcaaacttgatggtggc

SEQ ID NO: 109433 - DNA, 21 bp, Artificial Sequence
  primer
gtgcccttcgtggagatactg

SEQ ID NO: 109434 - DNA, 38 bp, Artificial Sequence
  primer
gtaaaacgacggccagtaagagcaacaaccactcaccc

SEQ ID NO: 109435 - DNA, 21 bp, Artificial Sequence
  primer
taggagctgaaatccatgctg

SEQ ID NO: 109436 - DNA, 22 bp, Artificial Sequence
  primer
gacgaacatctgaccaaagagg

SEQ ID NO: 109437 - DNA, 20 bp, Artificial Sequence
  primer
caagaatatgcccgactccc

SEQ ID NO: 109438 - DNA, 21 bp, Artificial Sequence
  primer
aaactgaggcaccgagacatt

SEQ ID NO: 109439 - DNA, 38 bp, Artificial Sequence
  primer
gtaaaacgacggccagtcgtctttcttggtccatctcc

SEQ ID NO: 109440 - DNA, 21 bp, Artificial Sequence
  primer
cttgctcttggtgatgggaac

SEQ ID NO: 109441 - DNA, 38 bp, Artificial Sequence
  primer
gtaaaacgacggccagtcctacgagactcaaagcaccc

SEQ ID NO: 109442 - DNA, 21 bp, Artificial Sequence
  primer
tgggtaggacaggaaatctgg

SEQ ID NO: 109443 - DNA, 38 bp, Artificial Sequence
  primer
gtaaaacgacggccagtgaccaaggatagctcccacac

SEQ ID NO: 109444 - DNA, 21 bp, Artificial Sequence
  primer
ggcagagacttcctccttcag

SEQ ID NO: 109445 - DNA, 38 bp, Artificial Sequence
  primer
gtaaaacgacggccagttgtccatgatcttgagggatg

SEQ ID NO: 109446 - DNA, 21 bp, Artificial Sequence
  primer
caactgcagggagtaaggagc

SEQ ID NO: 109447 - DNA, 21 bp, Artificial Sequence
  primer
tatgttccacatcccttgctg

SEQ ID NO: 109448 - DNA, 38 bp, Artificial Sequence
  primer
gtaaaacgacggccagtgctatggagcctgtgtggaac

SEQ ID NO: 109449 - DNA, 38 bp, Artificial Sequence
  primer
gtaaaacgacggccagtagcaatggcttatgaaggagc

SEQ ID NO: 109450 - DNA, 21 bp, Artificial Sequence
  primer
tgatccttggctaggttctcc

SEQ ID NO: 109451 - DNA, 39 bp, Artificial Sequence
  primer
gtaaaacgacggccagttgaatggttgctaacactccag

SEQ ID NO: 109452 - DNA, 38 bp, Artificial Sequence
  primer
gtaaaacgacggccagtaagcccagagaagttgctttc

SEQ ID NO: 109453 - DNA, 20 bp, Artificial Sequence
  primer
tcccagacacagagtccgtc

SEQ ID NO: 109454 - DNA, 18 bp, Artificial Sequence
  primer
caactgggttcgcccaag

SEQ ID NO: 109455 - DNA, 38 bp, Artificial Sequence
  primer
gtaaaacgacggccagtaactgctcaggaaagaggacc

SEQ ID NO: 109456 - DNA, 38 bp, Artificial Sequence
  primer
gtaaaacgacggccagtaggtaaaggatgcgagtctgg

SEQ ID NO: 109457 - DNA, 21 bp, Artificial Sequence
  primer
tcccagcagagtaggatttgg

SEQ ID NO: 109458 - DNA, 21 bp, Artificial Sequence
  primer
agagctgtggattctccaagg

SEQ ID NO: 109459 - DNA, 21 bp, Artificial Sequence
  primer
tttccataccttcattggctg

SEQ ID NO: 109460 - DNA, 38 bp, Artificial Sequence
  primer
gtaaaacgacggccagtggaggtcaaagctgacatgag

SEQ ID NO: 109461 - DNA, 41 bp, Artificial Sequence
  primer
gtaaaacgacggccagtgcacgaaagacattgtttagtcac

SEQ ID NO: 109462 - DNA, 39 bp, Artificial Sequence
  primer
gtaaaacgacggccagtccatggtaaattctcaagcaca

SEQ ID NO: 109463 - DNA, 38 bp, Artificial Sequence
  primer
gtaaaacgacggccagtcagacagggacagggagaatc

SEQ ID NO: 109464 - DNA, 39 bp, Artificial Sequence
  primer
gtaaaacgacggccagttcttgggctatacaaggaggaa

SEQ ID NO: 109465 - DNA, 38 bp, Artificial Sequence
  primer
gtaaaacgacggccagtataggtgtgagctaccatgcc

SEQ ID NO: 109466 - DNA, 38 bp, Artificial Sequence
  primer
gtaaaacgacggccagtaaagctgcaaggctaccacag

SEQ ID NO: 109467 - DNA, 42 bp, Artificial Sequence
  primer
gtaaaacgacggccagtcatagtctattggtactcagggcac

SEQ ID NO: 109468 - DNA, 38 bp, Artificial Sequence
  primer
gtaaaacgacggccagtgccctattgggagagacagtg

SEQ ID NO: 109469 - DNA, 38 bp, Artificial Sequence
  primer
gtaaaacgacggccagtgctaagacccagcctccatac

SEQ ID NO: 109470 - DNA, 46 bp, Artificial Sequence
  primer
gtaaaacgacggccagtttatttctaacttggtacagatacaggaa

SEQ ID NO: 109471 - DNA, 39 bp, Artificial Sequence
  primer
gtaaaacgacggccagtgggaagggcatacaggaatatg

SEQ ID NO: 109472 - DNA, 22 bp, Artificial Sequence
  primer
agggaagaagagatcaaggctc

SEQ ID NO: 109473 - DNA, 38 bp, Artificial Sequence
  primer
gtaaaacgacggccagttcctcttcctgtgtactgccc

SEQ ID NO: 109474 - DNA, 38 bp, Artificial Sequence
  primer
gtaaaacgacggccagtatttgtttaccacccaatggc

SEQ ID NO: 109475 - DNA, 21 bp, Artificial Sequence
  primer
gtggaaccacagtgatgggag

SEQ ID NO: 109476 - DNA, 42 bp, Artificial Sequence
  primer
gtaaaacgacggccagtgtatcctatgcttgccgatttatag

SEQ ID NO: 109477 - DNA, 38 bp, Artificial Sequence
  primer
gtaaaacgacggccagtcttcatgcaacaaccaggaac

SEQ ID NO: 109478 - DNA, 24 bp, Artificial Sequence
  primer
tgcataagctgaagagatcaacac

SEQ ID NO: 109479 - DNA, 38 bp, Artificial Sequence
  primer
gtaaaacgacggccagtttaatctggaacagcgtctgg

SEQ ID NO: 109480 - DNA, 21 bp, Artificial Sequence
  primer
atgaagcaagcagggtctgag

SEQ ID NO: 109481 - DNA, 38 bp, Artificial Sequence
  primer
gtaaaacgacggccagtctgctctgtgctcgcttattc

SEQ ID NO: 109482 - DNA, 37 bp, Artificial Sequence
  primer
gtaaaacgacggccagtcagaggagatgcaccctgac

SEQ ID NO: 109483 - DNA, 37 bp, Artificial Sequence
  primer
gtaaaacgacggccagtcacaacttcaggttcctggg

SEQ ID NO: 109484 - DNA, 38 bp, Artificial Sequence
  primer
gtaaaacgacggccagtgagaatggagaagcagatggg

SEQ ID NO: 109485 - DNA, 21 bp, Artificial Sequence
  primer
atgtgtcaggctgtaccaagc

SEQ ID NO: 109486 - DNA, 21 bp, Artificial Sequence
  primer
tgttctgcaggtgaattctgg

SEQ ID NO: 109487 - DNA, 38 bp, Artificial Sequence
  primer
gtaaaacgacggccagtcttgagccttgccctctgtag

SEQ ID NO: 109488 - DNA, 38 bp, Artificial Sequence
  primer
gtaaaacgacggccagtactgaggagtcttgtggtccc

SEQ ID NO: 109489 - DNA, 21 bp, Artificial Sequence
  primer
acacagaatcaggacccagaa

SEQ ID NO: 109490 - DNA, 38 bp, Artificial Sequence
  primer
gtaaaacgacggccagtgtggaggagctatggctgaac

SEQ ID NO: 109491 - DNA, 38 bp, Artificial Sequence
  primer
gtaaaacgacggccagttgtaaaccacaggacagggac

SEQ ID NO: 109492 - DNA, 21 bp, Artificial Sequence
  primer
acccaaacacaactcccttcc

SEQ ID NO: 109493 - DNA, 22 bp, Artificial Sequence
  primer
gctcaggacaagctccctttag

SEQ ID NO: 109494 - DNA, 21 bp, Artificial Sequence
  primer
ctcagctgttagccacaaacg

SEQ ID NO: 109495 - DNA, 38 bp, Artificial Sequence
  primer
gtaaaacgacggccagtagccgatcatttccaataagg

SEQ ID NO: 109496 - DNA, 21 bp, Artificial Sequence
  primer
agcagttccctgaaaccagag

SEQ ID NO: 109497 - DNA, 38 bp, Artificial Sequence
  primer
gtaaaacgacggccagtcttccaagagctggaatttgg

SEQ ID NO: 109498 - DNA, 20 bp, Artificial Sequence
  primer
gtcttgatcagggctgggac

SEQ ID NO: 109499 - DNA, 18 bp, Artificial Sequence
  primer
cagccattcacccacagg

SEQ ID NO: 109500 - DNA, 38 bp, Artificial Sequence
  primer
gtaaaacgacggccagttgagtagacgtcgtgacaccc

SEQ ID NO: 109501 - DNA, 38 bp, Artificial Sequence
  primer
gtaaaacgacggccagtgtgctctcagggtaggtggtc

SEQ ID NO: 109502 - DNA, 38 bp, Artificial Sequence
  primer
gtaaaacgacggccagtcctcaccgggatacaacagag

SEQ ID NO: 109503 - DNA, 37 bp, Artificial Sequence
  primer
gtaaaacgacggccagtcaaagggaaggatgggctac

SEQ ID NO: 109504 - DNA, 21 bp, Artificial Sequence
  primer
taaagcttcccactggtcctg

SEQ ID NO: 109505 - DNA, 21 bp, Artificial Sequence
  primer
cactgacttcacctcctctgg

SEQ ID NO: 109506 - DNA, 37 bp, Artificial Sequence
  primer
gtaaaacgacggccagtatcctgggaaagacaccagg

SEQ ID NO: 109507 - DNA, 38 bp, Artificial Sequence
  primer
gtaaaacgacggccagttcccaatgcatcatctctttg

SEQ ID NO: 109508 - DNA, 21 bp, Artificial Sequence
  primer
tcatggttaagcggatgtcac

SEQ ID NO: 109509 - DNA, 21 bp, Artificial Sequence
  primer
cctggatgcctattcaacctc

SEQ ID NO: 109510 - DNA, 21 bp, Artificial Sequence
  primer
ccggattagaccacaacagtg

SEQ ID NO: 109511 - DNA, 21 bp, Artificial Sequence
  primer
cctggctagctttcatctgtg

SEQ ID NO: 109512 - DNA, 38 bp, Artificial Sequence
  primer
gtaaaacgacggccagtggtgagaatgtgcatggagac

SEQ ID NO: 109513 - DNA, 38 bp, Artificial Sequence
  primer
gtaaaacgacggccagtctggaaacagtgaacacccac

SEQ ID NO: 109514 - DNA, 38 bp, Artificial Sequence
  primer
gtaaaacgacggccagtcacagaagacagccacagctc

SEQ ID NO: 109515 - DNA, 21 bp, Artificial Sequence
  primer
acacacagaggattcccaagc

SEQ ID NO: 109516 - DNA, 38 bp, Artificial Sequence
  primer
gtaaaacgacggccagtgcgcttagagtgcaggtagtg

SEQ ID NO: 109517 - DNA, 35 bp, Artificial Sequence
  primer
gtaaaacgacggccagtcaaacctcaccctcacgc

SEQ ID NO: 109518 - DNA, 38 bp, Artificial Sequence
  primer
gtaaaacgacggccagtgtcaaggttctcacatgtcgc

SEQ ID NO: 109519 - DNA, 21 bp, Artificial Sequence
  primer
cagacaagaggcaagggtcag

SEQ ID NO: 109520 - DNA, 38 bp, Artificial Sequence
  primer
gtaaaacgacggccagtccacagagaatcactcatccg

SEQ ID NO: 109521 - DNA, 20 bp, Artificial Sequence
  primer
ctgggaggagagtcctctgg

SEQ ID NO: 109522 - DNA, 20 bp, Artificial Sequence
  primer
acacaggctcactcctctgg

SEQ ID NO: 109523 - DNA, 36 bp, Artificial Sequence
  primer
gtaaaacgacggccagtctgcagcttctcctgctcc

SEQ ID NO: 109524 - DNA, 35 bp, Artificial Sequence
  primer
gtaaaacgacggccagtctgcctgcgaacttacgg

SEQ ID NO: 109525 - DNA, 38 bp, Artificial Sequence
  primer
gtaaaacgacggccagtttaatcaaagcatgcaggtgg

SEQ ID NO: 109526 - DNA, 21 bp, Artificial Sequence
  primer
tggaatcctttaacctggtgg

SEQ ID NO: 109527 - DNA, 27 bp, Artificial Sequence
  primer
tcaatccattaagtaacacattctgag

SEQ ID NO: 109528 - DNA, 21 bp, Artificial Sequence
  primer
cccaggaccagatgaactgag

SEQ ID NO: 109529 - DNA, 22 bp, Artificial Sequence
  primer
aatgagcaggcaattatgcttc

SEQ ID NO: 109530 - DNA, 38 bp, Artificial Sequence
  primer
gtaaaacgacggccagttttagccaatccaagaaagca

SEQ ID NO: 109531 - DNA, 36 bp, Artificial Sequence
  primer
gtaaaacgacggccagtgagctgacctgcctgtttg

SEQ ID NO: 109532 - DNA, 38 bp, Artificial Sequence
  primer
gtaaaacgacggccagtcaagcctggaagtagacaccc

SEQ ID NO: 109533 - DNA, 21 bp, Artificial Sequence
  primer
caagaggcagaagttgcactg

SEQ ID NO: 109534 - DNA, 38 bp, Artificial Sequence
  primer
gtaaaacgacggccagtaaacattccaccttgctcctg

SEQ ID NO: 109535 - DNA, 21 bp, Artificial Sequence
  primer
ctagtaggccaaactcccagg

SEQ ID NO: 109536 - DNA, 41 bp, Artificial Sequence
  primer
gtaaaacgacggccagtccttcagatttatgccaaccttac

SEQ ID NO: 109537 - DNA, 27 bp, Artificial Sequence
  primer
tttaaagatttactttggtctgtgagg

SEQ ID NO: 109538 - DNA, 39 bp, Artificial Sequence
  primer
gtaaaacgacggccagtaatgaatttcaagcctgtgctc

SEQ ID NO: 109539 - DNA, 21 bp, Artificial Sequence
  primer
atgttgcatggagcagatgag

SEQ ID NO: 109540 - DNA, 43 bp, Artificial Sequence
  primer
gtaaaacgacggccagtcaattcacagacacccttagtacatc

SEQ ID NO: 109541 - DNA, 39 bp, Artificial Sequence
  primer
gtaaaacgacggccagtgcctgagacaggtatggtatcc

SEQ ID NO: 109542 - DNA, 22 bp, Artificial Sequence
  primer
ccttaatggacacttgggattc

SEQ ID NO: 109543 - DNA, 26 bp, Artificial Sequence
  primer
aagtctagcatttgtgtagtcagcag

SEQ ID NO: 109544 - DNA, 23 bp, Artificial Sequence
  primer
ggatccagaagcagtattctgag

SEQ ID NO: 109545 - DNA, 20 bp, Artificial Sequence
  primer
aagacaacttggaggacggg

SEQ ID NO: 109546 - DNA, 23 bp, Artificial Sequence
  primer
ggcaggctgtctgaatatttctc

SEQ ID NO: 109547 - DNA, 39 bp, Artificial Sequence
  primer
gtaaaacgacggccagtttgaccagtggtgacagacatc

SEQ ID NO: 109548 - DNA, 36 bp, Artificial Sequence
  primer
gtaaaacgacggccagtctccaaagcggaaggaatc

SEQ ID NO: 109549 - DNA, 23 bp, Artificial Sequence
  primer
actccacttacaagacatttggc

SEQ ID NO: 109550 - DNA, 21 bp, Artificial Sequence
  primer
agcctgtgcactagcaggtta

SEQ ID NO: 109551 - DNA, 38 bp, Artificial Sequence
  primer
gtaaaacgacggccagtagactagggatggacacaggg

SEQ ID NO: 109552 - DNA, 38 bp, Artificial Sequence
  primer
gtaaaacgacggccagtggctcctcatctttgatgtcc

SEQ ID NO: 109553 - DNA, 38 bp, Artificial Sequence
  primer
gtaaaacgacggccagtcatccagcccagctttgtaac

SEQ ID NO: 109554 - DNA, 38 bp, Artificial Sequence
  primer
gtaaaacgacggccagtcgtcctgggaggaatttctat

SEQ ID NO: 109555 - DNA, 38 bp, Artificial Sequence
  primer
gtaaaacgacggccagtccacacggtctacaaaccaac

SEQ ID NO: 109556 - DNA, 38 bp, Artificial Sequence
  primer
gtaaaacgacggccagtacaaagctgcaactcccagtc

SEQ ID NO: 109557 - DNA, 21 bp, Artificial Sequence
  primer
tgggtgtgtagcgtgtgaatc

SEQ ID NO: 109558 - DNA, 39 bp, Artificial Sequence
  primer
gtaaaacgacggccagtgggttagtgggaaagaaaggac

SEQ ID NO: 109559 - DNA, 21 bp, Artificial Sequence
  primer
aggtgtgtgggagggttattc

SEQ ID NO: 109560 - DNA, 38 bp, Artificial Sequence
  primer
gtaaaacgacggccagtcgcctgttaacctctgggtag

SEQ ID NO: 109561 - DNA, 21 bp, Artificial Sequence
  primer
tggcagccaaagttgtagatg

SEQ ID NO: 109562 - DNA, 37 bp, Artificial Sequence
  primer
gtaaaacgacggccagtgtcagagcactcagcccttg

SEQ ID NO: 109563 - DNA, 21 bp, Artificial Sequence
  primer
catcagtcaacctggactccc

SEQ ID NO: 109564 - DNA, 21 bp, Artificial Sequence
  primer
gaaaggtttcaaacaggtggc

SEQ ID NO: 109565 - DNA, 21 bp, Artificial Sequence
  primer
cgcctccattgaaggaagtag

SEQ ID NO: 109566 - DNA, 38 bp, Artificial Sequence
  primer
gtaaaacgacggccagttctcccagcagactcagttcc

SEQ ID NO: 109567 - DNA, 37 bp, Artificial Sequence
  primer
gtaaaacgacggccagtaagagacaggatgtggcacg

SEQ ID NO: 109568 - DNA, 21 bp, Artificial Sequence
  primer
gggacagctaatgccaatctg

SEQ ID NO: 109569 - DNA, 21 bp, Artificial Sequence
  primer
cccagaaatcagaacaacgtc

SEQ ID NO: 109570 - DNA, 38 bp, Artificial Sequence
  primer
gtaaaacgacggccagttaacgcaaacatcggtcagag

SEQ ID NO: 109571 - DNA, 21 bp, Artificial Sequence
  primer
gtcgccctcaatcttaacgag

SEQ ID NO: 109572 - DNA, 20 bp, Artificial Sequence
  primer
ggaaatacgagacagcgagc

SEQ ID NO: 109573 - DNA, 20 bp, Artificial Sequence
  primer
agcacagacaggctgaatgg

SEQ ID NO: 109574 - DNA, 20 bp, Artificial Sequence
  primer
gcagcaaaggttcacaggac

SEQ ID NO: 109575 - DNA, 21 bp, Artificial Sequence
  primer
gggctcaaggacactgtgaac

SEQ ID NO: 109576 - DNA, 21 bp, Artificial Sequence
  primer
agactggccacagttagaccc

SEQ ID NO: 109577 - DNA, 38 bp, Artificial Sequence
  primer
gtaaaacgacggccagtttcctgctatgagctctccaa

SEQ ID NO: 109578 - DNA, 20 bp, Artificial Sequence
  primer
aggaagcagaagaaggcagg

SEQ ID NO: 109579 - DNA, 21 bp, Artificial Sequence
  primer
gccaagtttgtgattgtcacg

SEQ ID NO: 109580 - DNA, 36 bp, Artificial Sequence
  primer
gtaaaacgacggccagtgcttgtggccaatgtcttg

SEQ ID NO: 109581 - DNA, 37 bp, Artificial Sequence
  primer
gtaaaacgacggccagtactgcgccacagagtttacg

SEQ ID NO: 109582 - DNA, 40 bp, Artificial Sequence
  primer
gtaaaacgacggccagtcaaataatgcactttcaactccg

SEQ ID NO: 109583 - DNA, 39 bp, Artificial Sequence
  primer
gtaaaacgacggccagtggcaactatcatccagaaatgg

SEQ ID NO: 109584 - DNA, 20 bp, Artificial Sequence
  primer
tttgggcaccagaaagacac

SEQ ID NO: 109585 - DNA, 21 bp, Artificial Sequence
  primer
ccgaggatgacttcactttcc

SEQ ID NO: 109586 - DNA, 38 bp, Artificial Sequence
  primer
gtaaaacgacggccagtaagtttgtaacagggcccaaa

SEQ ID NO: 109587 - DNA, 26 bp, Artificial Sequence
  primer
catgaaagaaattaacacagcaacaa

SEQ ID NO: 109588 - DNA, 40 bp, Artificial Sequence
  primer
gtaaaacgacggccagtccagaaagtgtatcgtcttccaa

SEQ ID NO: 109589 - DNA, 38 bp, Artificial Sequence
  primer
gtaaaacgacggccagttggtggaggaggatgattaaa

SEQ ID NO: 109590 - DNA, 21 bp, Artificial Sequence
  primer
aaacagggatgccattaccac

SEQ ID NO: 109591 - DNA, 21 bp, Artificial Sequence
  primer
ctgtttcggctatttgacagc

SEQ ID NO: 109592 - DNA, 38 bp, Artificial Sequence
  primer
gtaaaacgacggccagtcattatgtggaccagccattg

SEQ ID NO: 109593 - DNA, 22 bp, Artificial Sequence
  primer
tgctgaaggatgattgcttctc

SEQ ID NO: 109594 - DNA, 41 bp, Artificial Sequence
  primer
gtaaaacgacggccagttgtgttatagtcaaatgccaacag

SEQ ID NO: 109595 - DNA, 42 bp, Artificial Sequence
  primer
gtaaaacgacggccagtcacaaagtttgagtgtgatttacca

SEQ ID NO: 109596 - DNA, 36 bp, Artificial Sequence
  primer
gtaaaacgacggccagtcaccaatcaacgcctgact

SEQ ID NO: 109597 - DNA, 38 bp, Artificial Sequence
  primer
gtaaaacgacggccagttggcagagaagctaagaaggc

SEQ ID NO: 109598 - DNA, 20 bp, Artificial Sequence
  primer
cagagggcatcacgagctac

SEQ ID NO: 109599 - DNA, 21 bp, Artificial Sequence
  primer
attctcccttcactccatccc

SEQ ID NO: 109600 - DNA, 38 bp, Artificial Sequence
  primer
gtaaaacgacggccagtccttgcagcagtcctaattcc

SEQ ID NO: 109601 - DNA, 38 bp, Artificial Sequence
  primer
gtaaaacgacggccagtctgcattgcatttcactctgc

SEQ ID NO: 109602 - DNA, 21 bp, Artificial Sequence
  primer
tcttgagagtgagggacatgc

SEQ ID NO: 109603 - DNA, 38 bp, Artificial Sequence
  primer
gtaaaacgacggccagtgtagaactgcctcttggaggg

SEQ ID NO: 109604 - DNA, 21 bp, Artificial Sequence
  primer
ccaacaagaggagcatcactg

SEQ ID NO: 109605 - DNA, 21 bp, Artificial Sequence
  primer
gcagagtttggctgtcatctg

SEQ ID NO: 109606 - DNA, 21 bp, Artificial Sequence
  primer
gaagcaactccctcaatgctc

SEQ ID NO: 109607 - DNA, 39 bp, Artificial Sequence
  primer
gtaaaacgacggccagtcccgtctgaaactttcccttag

SEQ ID NO: 109608 - DNA, 21 bp, Artificial Sequence
  primer
caactgtgaacactgtgtggg

SEQ ID NO: 109609 - DNA, 42 bp, Artificial Sequence
  primer
gtaaaacgacggccagttgtttaaattcatggaataagcaaa

SEQ ID NO: 109610 - DNA, 43 bp, Artificial Sequence
  primer
gtaaaacgacggccagttgaagaaactgctacataatgacaca

SEQ ID NO: 109611 - DNA, 22 bp, Artificial Sequence
  primer
aaaggacaaattagccatttca

SEQ ID NO: 109612 - DNA, 42 bp, Artificial Sequence
  primer
gtaaaacgacggccagtatattaacacacctgcattcagaaa

SEQ ID NO: 109613 - DNA, 21 bp, Artificial Sequence
  primer
atcaaaccagctattgaggcg

SEQ ID NO: 109614 - DNA, 38 bp, Artificial Sequence
  primer
gtaaaacgacggccagttttcatatagcccaggttccg

SEQ ID NO: 109615 - DNA, 38 bp, Artificial Sequence
  primer
gtaaaacgacggccagtattggatcctcaccacctcac

SEQ ID NO: 109616 - DNA, 38 bp, Artificial Sequence
  primer
gtaaaacgacggccagttgtgtaaattgccatccaatg

SEQ ID NO: 109617 - DNA, 21 bp, Artificial Sequence
  primer
ggttaaggagggtgagtgcag

SEQ ID NO: 109618 - DNA, 21 bp, Artificial Sequence
  primer
cccagacttatcagggacagg

SEQ ID NO: 109619 - DNA, 19 bp, Artificial Sequence
  primer
acagctctccagggtcagg

SEQ ID NO: 109620 - DNA, 21 bp, Artificial Sequence
  primer
gaagcctctgagacggtgaag

SEQ ID NO: 109621 - DNA, 38 bp, Artificial Sequence
  primer
gtaaaacgacggccagtacagccatggaagatggacag

SEQ ID NO: 109622 - DNA, 20 bp, Artificial Sequence
  primer
agcagggttcccttgcatac

SEQ ID NO: 109623 - DNA, 38 bp, Artificial Sequence
  primer
gtaaaacgacggccagtgagccatccctatggtgtcag

SEQ ID NO: 109624 - DNA, 38 bp, Artificial Sequence
  primer
gtaaaacgacggccagttctgtgtccctctccttctgg

SEQ ID NO: 109625 - DNA, 21 bp, Artificial Sequence
  primer
ccatgccctaagtgaggagtc

SEQ ID NO: 109626 - DNA, 38 bp, Artificial Sequence
  primer
gtaaaacgacggccagtttagcctggactcctccaatc

SEQ ID NO: 109627 - DNA, 20 bp, Artificial Sequence
  primer
tgctctcattgtcttgtgcg

SEQ ID NO: 109628 - DNA, 20 bp, Artificial Sequence
  primer
ggaagaaggctggattggac

SEQ ID NO: 109629 - DNA, 20 bp, Artificial Sequence
  primer
gctggaaacagctgaaaggg

SEQ ID NO: 109630 - DNA, 39 bp, Artificial Sequence
  primer
gtaaaacgacggccagtggcagtttgagagtgaagttcc

SEQ ID NO: 109631 - DNA, 21 bp, Artificial Sequence
  primer
acgccaactacatcatttccc

SEQ ID NO: 109632 - DNA, 21 bp, Artificial Sequence
  primer
tcccaccatccacggtattag

SEQ ID NO: 109633 - DNA, 21 bp, Artificial Sequence
  primer
ggatgactggaggaaggacac

SEQ ID NO: 109634 - DNA, 21 bp, Artificial Sequence
  primer
ccgacacctaaagggtgagag

SEQ ID NO: 109635 - DNA, 21 bp, Artificial Sequence
  primer
gctcttcttccttctgcaagc

SEQ ID NO: 109636 - DNA, 21 bp, Artificial Sequence
  primer
tttcctcctggaacgataagc

SEQ ID NO: 109637 - DNA, 19 bp, Artificial Sequence
  primer
accactgtccctgagccac

SEQ ID NO: 109638 - DNA, 38 bp, Artificial Sequence
  primer
gtaaaacgacggccagtctgcttgaagaactcccttgg

SEQ ID NO: 109639 - DNA, 21 bp, Artificial Sequence
  primer
gcctcccttctgagagagtcc

SEQ ID NO: 109640 - DNA, 21 bp, Artificial Sequence
  primer
agatccctggagaacggttac

SEQ ID NO: 109641 - DNA, 21 bp, Artificial Sequence
  primer
atcaaagttgagaagggtggc

SEQ ID NO: 109642 - DNA, 36 bp, Artificial Sequence
  primer
gtaaaacgacggccagtaagcatgaggaatgcaggg

SEQ ID NO: 109643 - DNA, 21 bp, Artificial Sequence
  primer
acctagcagaccgcttgtgtc

SEQ ID NO: 109644 - DNA, 21 bp, Artificial Sequence
  primer
acgagaggaaagccagtcaac

SEQ ID NO: 109645 - DNA, 21 bp, Artificial Sequence
  primer
gagctcctcccatgatctcag

SEQ ID NO: 109646 - DNA, 20 bp, Artificial Sequence
  primer
ccctctgactcagtccgtcc

SEQ ID NO: 109647 - DNA, 21 bp, Artificial Sequence
  primer
tgcacaccaggacagtgagag

SEQ ID NO: 109648 - DNA, 38 bp, Artificial Sequence
  primer
gtaaaacgacggccagtagccttgtagcctcgtttcag

SEQ ID NO: 109649 - DNA, 38 bp, Artificial Sequence
  primer
gtaaaacgacggccagtagtctggtcttctcccgacag

SEQ ID NO: 109650 - DNA, 19 bp, Artificial Sequence
  primer
gccctcaatccgagatcag

SEQ ID NO: 109651 - DNA, 20 bp, Artificial Sequence
  primer
acgagggtgagacagcactc

SEQ ID NO: 109652 - DNA, 38 bp, Artificial Sequence
  primer
gtaaaacgacggccagtcagtggaccaagacagctgag

SEQ ID NO: 109653 - DNA, 21 bp, Artificial Sequence
  primer
ggccacaatgaatctgtcaac

SEQ ID NO: 109654 - DNA, 21 bp, Artificial Sequence
  primer
agagtgaagcagcctctggtc

SEQ ID NO: 109655 - DNA, 21 bp, Artificial Sequence
  primer
cagaaactaagcaggcatggg

SEQ ID NO: 109656 - DNA, 38 bp, Artificial Sequence
  primer
gtaaaacgacggccagtgagcctcagtgtgaccatctg

SEQ ID NO: 109657 - DNA, 21 bp, Artificial Sequence
  primer
ctgaggcacagtcacagcttc

SEQ ID NO: 109658 - DNA, 19 bp, Artificial Sequence
  primer
gccctcaatccgagatcag

SEQ ID NO: 109659 - DNA, 38 bp, Artificial Sequence
  primer
gtaaaacgacggccagtctcctcactcactcacccgtc

SEQ ID NO: 109660 - DNA, 38 bp, Artificial Sequence
  primer
gtaaaacgacggccagtggttctcactcccacacatcc

SEQ ID NO: 109661 - DNA, 38 bp, Artificial Sequence
  primer
gtaaaacgacggccagtcagtgcataaatccctcagcc

SEQ ID NO: 109662 - DNA, 38 bp, Artificial Sequence
  primer
gtaaaacgacggccagtactccagaggtgcttctaccc

SEQ ID NO: 109663 - DNA, 21 bp, Artificial Sequence
  primer
gtgctgaatgtcaactcccag

SEQ ID NO: 109664 - DNA, 20 bp, Artificial Sequence
  primer
acgcaggtttctatgggacc

SEQ ID NO: 109665 - DNA, 37 bp, Artificial Sequence
  primer
gtaaaacgacggccagtaggaaggcgtccaggtctac

SEQ ID NO: 109666 - DNA, 22 bp, Artificial Sequence
  primer
cgtccaggtctacgtactccac

SEQ ID NO: 109667 - DNA, 21 bp, Artificial Sequence
  primer
tggtccctgacccattaagag

SEQ ID NO: 109668 - DNA, 38 bp, Artificial Sequence
  primer
gtaaaacgacggccagtaggctgagcactaatcccaag

SEQ ID NO: 109669 - DNA, 38 bp, Artificial Sequence
  primer
gtaaaacgacggccagtatctgcattatcacgtccctg

SEQ ID NO: 109670 - DNA, 21 bp, Artificial Sequence
  primer
ggatctaagggaaacaggcag

SEQ ID NO: 109671 - DNA, 38 bp, Artificial Sequence
  primer
gtaaaacgacggccagttccaactaacgcaaatcctga

SEQ ID NO: 109672 - DNA, 21 bp, Artificial Sequence
  primer
tggacaccaagaacgaaactc

SEQ ID NO: 109673 - DNA, 21 bp, Artificial Sequence
  primer
ctcagaaggttgaggcacaag

SEQ ID NO: 109674 - DNA, 21 bp, Artificial Sequence
  primer
ttgcttgtctttcccagaatc

SEQ ID NO: 109675 - DNA, 25 bp, Artificial Sequence
  primer
acaggatgaaatcaatgttaagaaa

SEQ ID NO: 109676 - DNA, 38 bp, Artificial Sequence
  primer
gtaaaacgacggccagttgcagtccagtttggataaca

SEQ ID NO: 109677 - DNA, 22 bp, Artificial Sequence
  primer
tctccacatcatcctgttcttc

SEQ ID NO: 109678 - DNA, 23 bp, Artificial Sequence
  primer
ggtgtattcatgccactatgtgc

SEQ ID NO: 109679 - DNA, 20 bp, Artificial Sequence
  primer
atccactgcagcgtaaatgg

SEQ ID NO: 109680 - DNA, 21 bp, Artificial Sequence
  primer
ttagaaggccaagacaggtgg

SEQ ID NO: 109681 - DNA, 38 bp, Artificial Sequence
  primer
gtaaaacgacggccagtgtttccactccagactggtcg

SEQ ID NO: 109682 - DNA, 22 bp, Artificial Sequence
  primer
gcccggctagaaatacagagtc

SEQ ID NO: 109683 - DNA, 40 bp, Artificial Sequence
  primer
gtaaaacgacggccagttgtatgacaaagtccttcaccac

SEQ ID NO: 109684 - DNA, 22 bp, Artificial Sequence
  primer
tttgcaacatttcatctcttcc

SEQ ID NO: 109685 - DNA, 38 bp, Artificial Sequence
  primer
gtaaaacgacggccagttttcatcatgggatagttggc

SEQ ID NO: 109686 - DNA, 40 bp, Artificial Sequence
  primer
gtaaaacgacggccagttttcccttcagtaagacttgaaa

SEQ ID NO: 109687 - DNA, 35 bp, Artificial Sequence
  primer
gtaaaacgacggccagtgccgagattgtgccattg

SEQ ID NO: 109688 - DNA, 24 bp, Artificial Sequence
  primer
tctgccatacagctatgtatttcc

SEQ ID NO: 109689 - DNA, 37 bp, Artificial Sequence
  primer
gtaaaacgacggccagtttcagggaacaaatgccaag

SEQ ID NO: 109690 - DNA, 43 bp, Artificial Sequence
  primer
gtaaaacgacggccagtgggaaaccttagaaatggttactctt

SEQ ID NO: 109691 - DNA, 36 bp, Artificial Sequence
  primer
gtaaaacgacggccagtatgtgctggcacagctagg

SEQ ID NO: 109692 - DNA, 21 bp, Artificial Sequence
  primer
aaactgaggccaggatgactc

SEQ ID NO: 109693 - DNA, 37 bp, Artificial Sequence
  primer
gtaaaacgacggccagtggacggagaaatacggcttc

SEQ ID NO: 109694 - DNA, 37 bp, Artificial Sequence
  primer
gtaaaacgacggccagtgacctaagccgtttccgaac

SEQ ID NO: 109695 - DNA, 19 bp, Artificial Sequence
  primer
cccgctagacaggagttcg

SEQ ID NO: 109696 - DNA, 38 bp, Artificial Sequence
  primer
gtaaaacgacggccagttaggacacggtgatttcctcc

SEQ ID NO: 109697 - DNA, 20 bp, Artificial Sequence
  primer
aaagtgaatgcgcagactgg

SEQ ID NO: 109698 - DNA, 21 bp, Artificial Sequence
  primer
aggctggaaggtacagtctcg

SEQ ID NO: 109699 - DNA, 36 bp, Artificial Sequence
  primer
gtaaaacgacggccagtagttcccaaaccggctctc

SEQ ID NO: 109700 - DNA, 38 bp, Artificial Sequence
  primer
gtaaaacgacggccagtggaattagctccttgccattg

SEQ ID NO: 109701 - DNA, 21 bp, Artificial Sequence
  primer
aacacctcaggctccagtacc

SEQ ID NO: 109702 - DNA, 24 bp, Artificial Sequence
  primer
ggtacaagctagctggcattagag

SEQ ID NO: 109703 - DNA, 39 bp, Artificial Sequence
  primer
gtaaaacgacggccagttcgtttccttctatcaacggag

SEQ ID NO: 109704 - DNA, 38 bp, Artificial Sequence
  primer
gtaaaacgacggccagtttcctcatttgtgttcatggc

SEQ ID NO: 109705 - DNA, 39 bp, Artificial Sequence
  primer
gtaaaacgacggccagttccatggttcaatctctcacag

SEQ ID NO: 109706 - DNA, 21 bp, Artificial Sequence
  primer
tggacgttaacacttcggacc

SEQ ID NO: 109707 - DNA, 42 bp, Artificial Sequence
  primer
gtaaaacgacggccagtaaactgacaccctactgtaaattgg

SEQ ID NO: 109708 - DNA, 40 bp, Artificial Sequence
  primer
gtaaaacgacggccagttttcacccatgtaaatgaaagtt

SEQ ID NO: 109709 - DNA, 38 bp, Artificial Sequence
  primer
gtaaaacgacggccagttccaagcttcaatacgcttcc

SEQ ID NO: 109710 - DNA, 21 bp, Artificial Sequence
  primer
tgctttgaatccaatctcctc

SEQ ID NO: 109711 - DNA, 20 bp, Artificial Sequence
  primer
agcaatggtcccttggagag

SEQ ID NO: 109712 - DNA, 38 bp, Artificial Sequence
  primer
gtaaaacgacggccagttcaactgtcagagggcaaatg

SEQ ID NO: 109713 - DNA, 37 bp, Artificial Sequence
  primer
gtaaaacgacggccagttttagccacgtacaccctcc

SEQ ID NO: 109714 - DNA, 21 bp, Artificial Sequence
  primer
tgacataatcttggcctggtg

SEQ ID NO: 109715 - DNA, 38 bp, Artificial Sequence
  primer
gtaaaacgacggccagttaaaccggaacctacactcgc

SEQ ID NO: 109716 - DNA, 39 bp, Artificial Sequence
  primer
gtaaaacgacggccagtgatatcgcctagagacgagcag

SEQ ID NO: 109717 - DNA, 21 bp, Artificial Sequence
  primer
tcagccttgtccatgtcattc

SEQ ID NO: 109718 - DNA, 40 bp, Artificial Sequence
  primer
gtaaaacgacggccagttgccacagactggaaatagagac

SEQ ID NO: 109719 - DNA, 42 bp, Artificial Sequence
  primer
gtaaaacgacggccagttgtatttgtttgggagtgatctttg

SEQ ID NO: 109720 - DNA, 21 bp, Artificial Sequence
  primer
ctgggccaatgtacagaaatg

SEQ ID NO: 109721 - DNA, 21 bp, Artificial Sequence
  primer
ttccaactagctcctgaaggc

SEQ ID NO: 109722 - DNA, 41 bp, Artificial Sequence
  primer
gtaaaacgacggccagtaaagagtggaagaaacctgatagc

SEQ ID NO: 109723 - DNA, 21 bp, Artificial Sequence
  primer
tttgtgcaagaagggctaatg

SEQ ID NO: 109724 - DNA, 21 bp, Artificial Sequence
  primer
cttgttgggatgtctgggaac

SEQ ID NO: 109725 - DNA, 19 bp, Artificial Sequence
  primer
cctggcccacaacactttc

SEQ ID NO: 109726 - DNA, 21 bp, Artificial Sequence
  primer
gaaatgacccattctgctgtc

SEQ ID NO: 109727 - DNA, 21 bp, Artificial Sequence
  primer
aagctggcaaatgtcagtgtg

SEQ ID NO: 109728 - DNA, 38 bp, Artificial Sequence
  primer
gtaaaacgacggccagtgaacagtctcggaggagcttg

SEQ ID NO: 109729 - DNA, 21 bp, Artificial Sequence
  primer
gagcgacaaggaatgcagtaa

SEQ ID NO: 109730 - DNA, 38 bp, Artificial Sequence
  primer
gtaaaacgacggccagtttaacacaccacttgcccttc

SEQ ID NO: 109731 - DNA, 38 bp, Artificial Sequence
  primer
gtaaaacgacggccagtccacaattatgtccagggatg

SEQ ID NO: 109732 - DNA, 25 bp, Artificial Sequence
  primer
gtacaaacgtatctggtttaacgtg

SEQ ID NO: 109733 - DNA, 23 bp, Artificial Sequence
  primer
tgctaataggaatgaatgcatgg

SEQ ID NO: 109734 - DNA, 21 bp, Artificial Sequence
  primer
cttgctatcacatccctgctg

SEQ ID NO: 109735 - DNA, 18 bp, Artificial Sequence
  primer
cctgacctcatgatccgc

SEQ ID NO: 109736 - DNA, 40 bp, Artificial Sequence
  primer
gtaaaacgacggccagtttggaggtaggtagagaagcacc

SEQ ID NO: 109737 - DNA, 19 bp, Artificial Sequence
  primer
catgcttggcctcactgtc

SEQ ID NO: 109738 - DNA, 21 bp, Artificial Sequence
  primer
tggtgctttgacttgtcttgc

SEQ ID NO: 109739 - DNA, 42 bp, Artificial Sequence
  primer
gtaaaacgacggccagttccacctccaatgtttatatgacag

SEQ ID NO: 109740 - DNA, 20 bp, Artificial Sequence
  primer
ctgggagacacagggagacc

SEQ ID NO: 109741 - DNA, 39 bp, Artificial Sequence
  primer
gtaaaacgacggccagtcctccttatgctttcaatcagc

SEQ ID NO: 109742 - DNA, 20 bp, Artificial Sequence
  primer
ttctctcctgtctccctccc

SEQ ID NO: 109743 - DNA, 19 bp, Artificial Sequence
  primer
tctctgagatccatccggg

SEQ ID NO: 109744 - DNA, 20 bp, Artificial Sequence
  primer
cagcgtctgcagatttgttc

SEQ ID NO: 109745 - DNA, 39 bp, Artificial Sequence
  primer
gtaaaacgacggccagttcccacatagcaccttacactg

SEQ ID NO: 109746 - DNA, 25 bp, Artificial Sequence
  primer
tctttctgctctattccaatttcag

SEQ ID NO: 109747 - DNA, 24 bp, Artificial Sequence
  primer
ttgaagtctcggaacaatgatatg

SEQ ID NO: 109748 - DNA, 26 bp, Artificial Sequence
  primer
ttcctgagaaatcagttaatctaggc

SEQ ID NO: 109749 - DNA, 22 bp, Artificial Sequence
  primer
ccagaatacagaggttgcagtg

SEQ ID NO: 109750 - DNA, 39 bp, Artificial Sequence
  primer
gtaaaacgacggccagtagcaactgacacagtgcctaac

SEQ ID NO: 109751 - DNA, 21 bp, Artificial Sequence
  primer
gagaaccctgaccaacacaaa

SEQ ID NO: 109752 - DNA, 27 bp, Artificial Sequence
  primer
tttctaaagtcagtagagtaaggccaa

SEQ ID NO: 109753 - DNA, 26 bp, Artificial Sequence
  primer
agagtttaaccagaaagacactcaca

SEQ ID NO: 109754 - DNA, 38 bp, Artificial Sequence
  primer
gtaaaacgacggccagtttcattgctactgcgaggttg

SEQ ID NO: 109755 - DNA, 21 bp, Artificial Sequence
  primer
agcaattctacatggcagcag

SEQ ID NO: 109756 - DNA, 25 bp, Artificial Sequence
  primer
accttaactctcactctcaaacagg

SEQ ID NO: 109757 - DNA, 37 bp, Artificial Sequence
  primer
gtaaaacgacggccagtcacagaaagccggtctcctc

SEQ ID NO: 109758 - DNA, 42 bp, Artificial Sequence
  primer
gtaaaacgacggccagttgtaaatcccaaagcactttatagc

SEQ ID NO: 109759 - DNA, 21 bp, Artificial Sequence
  primer
ctggtacaccaattcgtctgg

SEQ ID NO: 109760 - DNA, 39 bp, Artificial Sequence
  primer
gtaaaacgacggccagtcaccttaaagcaagatggcaag

SEQ ID NO: 109761 - DNA, 38 bp, Artificial Sequence
  primer
gtaaaacgacggccagtctcgccaaatgaaatgagaag

SEQ ID NO: 109762 - DNA, 20 bp, Artificial Sequence
  primer
gggcacaaggtttcagtgag

SEQ ID NO: 109763 - DNA, 21 bp, Artificial Sequence
  primer
ttcggcaaggaagaaagaaat

SEQ ID NO: 109764 - DNA, 37 bp, Artificial Sequence
  primer
gtaaaacgacggccagtcatcttctcatcccagtggc

SEQ ID NO: 109765 - DNA, 38 bp, Artificial Sequence
  primer
gtaaaacgacggccagtggacatgtgtggagtattggg

SEQ ID NO: 109766 - DNA, 22 bp, Artificial Sequence
  primer
gggctgaattctttgatcactc

SEQ ID NO: 109767 - DNA, 38 bp, Artificial Sequence
  primer
gtaaaacgacggccagttattgccatattgcccttgag

SEQ ID NO: 109768 - DNA, 21 bp, Artificial Sequence
  primer
gatctcctcctgccattaccc

SEQ ID NO: 109769 - DNA, 21 bp, Artificial Sequence
  primer
ttcgcaaaggttctgtgaaag

SEQ ID NO: 109770 - DNA, 38 bp, Artificial Sequence
  primer
gtaaaacgacggccagtgcccatttacctcttaccacc

SEQ ID NO: 109771 - DNA, 23 bp, Artificial Sequence
  primer
tccagctgggagtatgtatcttg

SEQ ID NO: 109772 - DNA, 38 bp, Artificial Sequence
  primer
gtaaaacgacggccagttcaagacagcagttgggtgag

SEQ ID NO: 109773 - DNA, 21 bp, Artificial Sequence
  primer
tagatgtcacctgcctggatg

SEQ ID NO: 109774 - DNA, 40 bp, Artificial Sequence
  primer
gtaaaacgacggccagtttcactaatgtttccctgttgtg

SEQ ID NO: 109775 - DNA, 21 bp, Artificial Sequence
  primer
gttgaaaccatcataccaggg

SEQ ID NO: 109776 - DNA, 25 bp, Artificial Sequence
  primer
ttcctcctacttaatttcgacaacc

SEQ ID NO: 109777 - DNA, 38 bp, Artificial Sequence
  primer
gtaaaacgacggccagtaacgactcatgacagtccagg

SEQ ID NO: 109778 - DNA, 21 bp, Artificial Sequence
  primer
taacaccctgaagaaaccgtg

SEQ ID NO: 109779 - DNA, 39 bp, Artificial Sequence
  primer
gtaaaacgacggccagttcagctgagatgtagggacaga

SEQ ID NO: 109780 - DNA, 21 bp, Artificial Sequence
  primer
gcagggccatttctaacacag

SEQ ID NO: 109781 - DNA, 21 bp, Artificial Sequence
  primer
tcatcaggtgtatggtccagg

SEQ ID NO: 109782 - DNA, 38 bp, Artificial Sequence
  primer
gtaaaacgacggccagtggttcctggcacttgtagttg

SEQ ID NO: 109783 - DNA, 38 bp, Artificial Sequence
  primer
gtaaaacgacggccagtgaacgcagaaagaggaccatc

SEQ ID NO: 109784 - DNA, 25 bp, Artificial Sequence
  primer
tgacatgcaaattagtagggaagac

SEQ ID NO: 109785 - DNA, 38 bp, Artificial Sequence
  primer
gtaaaacgacggccagttcctcatttccatttgtccag

SEQ ID NO: 109786 - DNA, 38 bp, Artificial Sequence
  primer
gtaaaacgacggccagtccaaagcactgtgttggaaag

SEQ ID NO: 109787 - DNA, 20 bp, Artificial Sequence
  primer
ctaggccttctcaagcaccc

SEQ ID NO: 109788 - DNA, 40 bp, Artificial Sequence
  primer
gtaaaacgacggccagtggtgaatggacagtactcattgg

SEQ ID NO: 109789 - DNA, 21 bp, Artificial Sequence
  primer
cacaggtgtgctgtttatggg

SEQ ID NO: 109790 - DNA, 21 bp, Artificial Sequence
  primer
caggtcagtgcatctctctgg

SEQ ID NO: 109791 - DNA, 39 bp, Artificial Sequence
  primer
gtaaaacgacggccagtcacaagactccaacaaacaagc

SEQ ID NO: 109792 - DNA, 27 bp, Artificial Sequence
  primer
agactgacaagacattaattgttcaag

SEQ ID NO: 109793 - DNA, 38 bp, Artificial Sequence
  primer
gtaaaacgacggccagtacgcagtagggtgaagatgtc

SEQ ID NO: 109794 - DNA, 38 bp, Artificial Sequence
  primer
gtaaaacgacggccagtgccctgggtttaattccaatc

SEQ ID NO: 109795 - DNA, 18 bp, Artificial Sequence
  primer
gtgtgagccactgcaccc

SEQ ID NO: 109796 - DNA, 22 bp, Artificial Sequence
  primer
ccaaattcagctccaactcaag

SEQ ID NO: 109797 - DNA, 21 bp, Artificial Sequence
  primer
agggaagcagtatcctcaggg

SEQ ID NO: 109798 - DNA, 47 bp, Artificial Sequence
  primer
gtaaaacgacggccagtaaatcatagagacctcagacataatatagg

SEQ ID NO: 109799 - DNA, 38 bp, Artificial Sequence
  primer
gtaaaacgacggccagttgtggagaacctagtgggagg

SEQ ID NO: 109800 - DNA, 20 bp, Artificial Sequence
  primer
cccatgctctgtccttctcc

SEQ ID NO: 109801 - DNA, 21 bp, Artificial Sequence
  primer
atgggtgtagctgtgtccctg

SEQ ID NO: 109802 - DNA, 22 bp, Artificial Sequence
  primer
ggaattggagacatttgaaagc

SEQ ID NO: 109803 - DNA, 20 bp, Artificial Sequence
  primer
catggagtgctcttccaacc

SEQ ID NO: 109804 - DNA, 20 bp, Artificial Sequence
  primer
aggttcccatgaccatgtcc

SEQ ID NO: 109805 - DNA, 27 bp, Artificial Sequence
  primer
tcaattgaaacattataaactctgctc

SEQ ID NO: 109806 - DNA, 25 bp, Artificial Sequence
  primer
aaaggagaggagtgaaattcctatg

SEQ ID NO: 109807 - DNA, 25 bp, Artificial Sequence
  primer
tgagctgtaaatgcgtaaacattag

SEQ ID NO: 109808 - DNA, 42 bp, Artificial Sequence
  primer
gtaaaacgacggccagttgttggcatcgatatttagaagaag

SEQ ID NO: 109809 - DNA, 43 bp, Artificial Sequence
  primer
gtaaaacgacggccagtaaactccaaacttgtgttgaaataaa

SEQ ID NO: 109810 - DNA, 21 bp, Artificial Sequence
  primer
cttctgggatacgtgaagcac

SEQ ID NO: 109811 - DNA, 22 bp, Artificial Sequence
  primer
gggtagggatctgcatttcttc

SEQ ID NO: 109812 - DNA, 39 bp, Artificial Sequence
  primer
gtaaaacgacggccagtgaatgccgtccaaatctctaag

SEQ ID NO: 109813 - DNA, 38 bp, Artificial Sequence
  primer
gtaaaacgacggccagtcgagaagctgggtttatgagg

SEQ ID NO: 109814 - DNA, 21 bp, Artificial Sequence
  primer
aaagaaactgaggcatacggg

SEQ ID NO: 109815 - DNA, 38 bp, Artificial Sequence
  primer
gtaaaacgacggccagtcagtctcccatcatggcaata

SEQ ID NO: 109816 - DNA, 21 bp, Artificial Sequence
  primer
ttggttatacaccacgaagcg

SEQ ID NO: 109817 - DNA, 19 bp, Artificial Sequence
  primer
gggcccagagaaacaatgg

SEQ ID NO: 109818 - DNA, 21 bp, Artificial Sequence
  primer
ccatcttgctcttcaatgctc

SEQ ID NO: 109819 - DNA, 22 bp, Artificial Sequence
  primer
gattaattctctgaatgcacgc

SEQ ID NO: 109820 - DNA, 39 bp, Artificial Sequence
  primer
gtaaaacgacggccagttctggtctttccactaggcttc

SEQ ID NO: 109821 - DNA, 38 bp, Artificial Sequence
  primer
gtaaaacgacggccagtgagcatggtcgttgatgtcag

SEQ ID NO: 109822 - DNA, 21 bp, Artificial Sequence
  primer
ccatcaccagatagcgcatag

SEQ ID NO: 109823 - DNA, 38 bp, Artificial Sequence
  primer
gtaaaacgacggccagtctctcagacaccacagcatgg

SEQ ID NO: 109824 - DNA, 19 bp, Artificial Sequence
  primer
accaccagttcatggaccc

SEQ ID NO: 109825 - DNA, 38 bp, Artificial Sequence
  primer
gtaaaacgacggccagttctgtggctgtaaccctcaag

SEQ ID NO: 109826 - DNA, 38 bp, Artificial Sequence
  primer
gtaaaacgacggccagtctgtggcagaggaggctagag

SEQ ID NO: 109827 - DNA, 38 bp, Artificial Sequence
  primer
gtaaaacgacggccagtccttgtaaggcttggttcctg

SEQ ID NO: 109828 - DNA, 20 bp, Artificial Sequence
  primer
atgcagccataggtcaggtg

SEQ ID NO: 109829 - DNA, 21 bp, Artificial Sequence
  primer
aaaggttatggaggaggtggg

SEQ ID NO: 109830 - DNA, 38 bp, Artificial Sequence
  primer
gtaaaacgacggccagtgggctatctgccctgtgatac

SEQ ID NO: 109831 - DNA, 21 bp, Artificial Sequence
  primer
gcagggtaaaggtgactcgac

SEQ ID NO: 109832 - DNA, 21 bp, Artificial Sequence
  primer
tctgctgcaaggtgataggtg

SEQ ID NO: 109833 - DNA, 21 bp, Artificial Sequence
  primer
ctgttgcaggctgtaggtcag

SEQ ID NO: 109834 - DNA, 21 bp, Artificial Sequence
  primer
cctaagaagctggtgtttggg

SEQ ID NO: 109835 - DNA, 21 bp, Artificial Sequence
  primer
caggataaagcttccctcacc

SEQ ID NO: 109836 - DNA, 21 bp, Artificial Sequence
  primer
gacaggcagaggaagatgagg

SEQ ID NO: 109837 - DNA, 38 bp, Artificial Sequence
  primer
gtaaaacgacggccagtgactgctagtggagccaaagg

SEQ ID NO: 109838 - DNA, 18 bp, Artificial Sequence
  primer
cacttgcacctgcactcg

SEQ ID NO: 109839 - DNA, 38 bp, Artificial Sequence
  primer
gtaaaacgacggccagttcattctcatccgtgacgaag

SEQ ID NO: 109840 - DNA, 37 bp, Artificial Sequence
  primer
gtaaaacgacggccagttccacatcagcaccttcctc

SEQ ID NO: 109841 - DNA, 21 bp, Artificial Sequence
  primer
ctcctaggtgagcggtaaggc

SEQ ID NO: 109842 - DNA, 21 bp, Artificial Sequence
  primer
acgcctccataagtcacttgc

SEQ ID NO: 109843 - DNA, 39 bp, Artificial Sequence
  primer
gtaaaacgacggccagtcaggagctttgtggtaataggc

SEQ ID NO: 109844 - DNA, 37 bp, Artificial Sequence
  primer
gtaaaacgacggccagtggagacccagacacatgcac

SEQ ID NO: 109845 - DNA, 21 bp, Artificial Sequence
  primer
agtaggcaggcacaggaaagg

SEQ ID NO: 109846 - DNA, 21 bp, Artificial Sequence
  primer
caccagcatcacgatcttcag

SEQ ID NO: 109847 - DNA, 38 bp, Artificial Sequence
  primer
gtaaaacgacggccagttctcacgaatcgtagcctcac

SEQ ID NO: 109848 - DNA, 39 bp, Artificial Sequence
  primer
gtaaaacgacggccagtgcagaaagaacggtattgttgg

SEQ ID NO: 109849 - DNA, 21 bp, Artificial Sequence
  primer
ggctcctctgatgcaaagaac

SEQ ID NO: 109850 - DNA, 38 bp, Artificial Sequence
  primer
gtaaaacgacggccagtaatctgtcctccagagccttg

SEQ ID NO: 109851 - DNA, 21 bp, Artificial Sequence
  primer
agggaccagatgagttcaagg

SEQ ID NO: 109852 - DNA, 21 bp, Artificial Sequence
  primer
aatctctgagcccaataacgc

SEQ ID NO: 109853 - DNA, 38 bp, Artificial Sequence
  primer
gtaaaacgacggccagtcattcccagatcagctccaac

SEQ ID NO: 109854 - DNA, 38 bp, Artificial Sequence
  primer
gtaaaacgacggccagtctccctaggccagagatccag

SEQ ID NO: 109855 - DNA, 21 bp, Artificial Sequence
  primer
atctgtagcctccagggtgag

SEQ ID NO: 109856 - DNA, 38 bp, Artificial Sequence
  primer
gtaaaacgacggccagtctcagctccaacaggtgtgtc

SEQ ID NO: 109857 - DNA, 18 bp, Artificial Sequence
  primer
gtgcaccagcagggtcag

SEQ ID NO: 109858 - DNA, 38 bp, Artificial Sequence
  primer
gtaaaacgacggccagttccagtcactagcaccgacac

SEQ ID NO: 109859 - DNA, 21 bp, Artificial Sequence
  primer
ggcaagggaatacagaaccag

SEQ ID NO: 109860 - DNA, 38 bp, Artificial Sequence
  primer
gtaaaacgacggccagtgtgtgggtgatatccacggtc

SEQ ID NO: 109861 - DNA, 38 bp, Artificial Sequence
  primer
gtaaaacgacggccagtccatagctgggaagagtctgg

SEQ ID NO: 109862 - DNA, 21 bp, Artificial Sequence
  primer
gcaggatgtgtcactcagacc

SEQ ID NO: 109863 - DNA, 38 bp, Artificial Sequence
  primer
gtaaaacgacggccagtatctgctgggaagccatagtc

SEQ ID NO: 109864 - DNA, 38 bp, Artificial Sequence
  primer
gtaaaacgacggccagtacagagagggtgagaagctgg

SEQ ID NO: 109865 - DNA, 21 bp, Artificial Sequence
  primer
ggtcacaggtcagtgagcaac

SEQ ID NO: 109866 - DNA, 21 bp, Artificial Sequence
  primer
ttccaaggctttatttccctg

SEQ ID NO: 109867 - DNA, 39 bp, Artificial Sequence
  primer
gtaaaacgacggccagtttgcctccttattgaaacatcc

SEQ ID NO: 109868 - DNA, 22 bp, Artificial Sequence
  primer
tgatcatcattggtcctctgtg

SEQ ID NO: 109869 - DNA, 38 bp, Artificial Sequence
  primer
gtaaaacgacggccagtaactcgaagctctgacaaccc

SEQ ID NO: 109870 - DNA, 21 bp, Artificial Sequence
  primer
aacccactacaaagcctcagc

SEQ ID NO: 109871 - DNA, 21 bp, Artificial Sequence
  primer
taacatcaacgaacctttggc

SEQ ID NO: 109872 - DNA, 38 bp, Artificial Sequence
  primer
gtaaaacgacggccagtccaggcattgacttctcctct

SEQ ID NO: 109873 - DNA, 26 bp, Artificial Sequence
  primer
aaattattcaagattgtaccgcctac

SEQ ID NO: 109874 - DNA, 21 bp, Artificial Sequence
  primer
tcgataacgactgtcagcacc

SEQ ID NO: 109875 - DNA, 37 bp, Artificial Sequence
  primer
gtaaaacgacggccagtggaacagggctctcttcgac

SEQ ID NO: 109876 - DNA, 26 bp, Artificial Sequence
  primer
aaagacgagtgtgatagtactgaacc

SEQ ID NO: 109877 - DNA, 20 bp, Artificial Sequence
  primer
gagagtggaaaggcagcttg

SEQ ID NO: 109878 - DNA, 38 bp, Artificial Sequence
  primer
gtaaaacgacggccagtagtatgctttgccacaccaag

SEQ ID NO: 109879 - DNA, 27 bp, Artificial Sequence
  primer
gcaaattactcactaaagatgaatggt

SEQ ID NO: 109880 - DNA, 41 bp, Artificial Sequence
  primer
gtaaaacgacggccagtaagtatgctatgtgcaatgctctc

SEQ ID NO: 109881 - DNA, 38 bp, Artificial Sequence
  primer
gtaaaacgacggccagtttctctgtcaagacgggacac

SEQ ID NO: 109882 - DNA, 21 bp, Artificial Sequence
  primer
gcagttatgtggtggaccaag

SEQ ID NO: 109883 - DNA, 39 bp, Artificial Sequence
  primer
gtaaaacgacggccagtaactttgttaggagggtgggtc

SEQ ID NO: 109884 - DNA, 21 bp, Artificial Sequence
  primer
tgtgtggatgcaaatgaaaga

SEQ ID NO: 109885 - DNA, 21 bp, Artificial Sequence
  primer
ctaaccaggtagcactggctc

SEQ ID NO: 109886 - DNA, 21 bp, Artificial Sequence
  primer
gtgaagttgcagtgagccatc

SEQ ID NO: 109887 - DNA, 21 bp, Artificial Sequence
  primer
agcacaagaaccactgttccc

SEQ ID NO: 109888 - DNA, 21 bp, Artificial Sequence
  primer
ctctggccacagcactaaatg

SEQ ID NO: 109889 - DNA, 38 bp, Artificial Sequence
  primer
gtaaaacgacggccagtagccctttatacaggtggtgg

SEQ ID NO: 109890 - DNA, 39 bp, Artificial Sequence
  primer
gtaaaacgacggccagttcagaccaggttccacttaacc

SEQ ID NO: 109891 - DNA, 38 bp, Artificial Sequence
  primer
gtaaaacgacggccagttgaagggcaggatagacactg

SEQ ID NO: 109892 - DNA, 21 bp, Artificial Sequence
  primer
aatgtacatggcctggaaaga

SEQ ID NO: 109893 - DNA, 21 bp, Artificial Sequence
  primer
tcaacaagttggatcaaaggg

SEQ ID NO: 109894 - DNA, 39 bp, Artificial Sequence
  primer
gtaaaacgacggccagttgcttggttgttgaggattagc

SEQ ID NO: 109895 - DNA, 38 bp, Artificial Sequence
  primer
gtaaaacgacggccagtctatcggcgatggaagactta

SEQ ID NO: 109896 - DNA, 21 bp, Artificial Sequence
  primer
tcgtgcttataattccatgcg

SEQ ID NO: 109897 - DNA, 21 bp, Artificial Sequence
  primer
tggctagcacttgcttctctg

SEQ ID NO: 109898 - DNA, 38 bp, Artificial Sequence
  primer
gtaaaacgacggccagtttctgcatctgaagcttggac

SEQ ID NO: 109899 - DNA, 21 bp, Artificial Sequence
  primer
cccttcaatatccacccagac

SEQ ID NO: 109900 - DNA, 39 bp, Artificial Sequence
  primer
gtaaaacgacggccagtgaaaggagatgaggttccaagg

SEQ ID NO: 109901 - DNA, 21 bp, Artificial Sequence
  primer
cacctcgttactgcagtcgtc

SEQ ID NO: 109902 - DNA, 38 bp, Artificial Sequence
  primer
gtaaaacgacggccagttcaccatcacatcagtttccc

SEQ ID NO: 109903 - DNA, 21 bp, Artificial Sequence
  primer
gaggcaagaggttggaatttg

SEQ ID NO: 109904 - DNA, 38 bp, Artificial Sequence
  primer
gtaaaacgacggccagtaattgggagtcatgccttctg

SEQ ID NO: 109905 - DNA, 21 bp, Artificial Sequence
  primer
cattcatgaccaatggtgagc

SEQ ID NO: 109906 - DNA, 43 bp, Artificial Sequence
  primer
gtaaaacgacggccagtggaagaaattggagaaactttaatgg

SEQ ID NO: 109907 - DNA, 35 bp, Artificial Sequence
  primer
gtaaaacgacggccagtggttctccgacagcaccc

SEQ ID NO: 109908 - DNA, 21 bp, Artificial Sequence
  primer
atgacgaacgaacccaggtag

SEQ ID NO: 109909 - DNA, 38 bp, Artificial Sequence
  primer
gtaaaacgacggccagttttgggaatgatctgcttgag

SEQ ID NO: 109910 - DNA, 38 bp, Artificial Sequence
  primer
gtaaaacgacggccagtgagagattccaagggcaggac

SEQ ID NO: 109911 - DNA, 20 bp, Artificial Sequence
  primer
aatgcagacacccactcacc

SEQ ID NO: 109912 - DNA, 20 bp, Artificial Sequence
  primer
cgaagtcacgatgtccacag

SEQ ID NO: 109913 - DNA, 38 bp, Artificial Sequence
  primer
gtaaaacgacggccagtcactgggctatgaggaacagg

SEQ ID NO: 109914 - DNA, 37 bp, Artificial Sequence
  primer
gtaaaacgacggccagtagttgctgcagagagatgcg

SEQ ID NO: 109915 - DNA, 23 bp, Artificial Sequence
  primer
ccatatcaatctgaaacccattg

SEQ ID NO: 109916 - DNA, 21 bp, Artificial Sequence
  primer
cccagctcagccattcattat

SEQ ID NO: 109917 - DNA, 40 bp, Artificial Sequence
  primer
gtaaaacgacggccagtgctggagttaaactaaattgccc

SEQ ID NO: 109918 - DNA, 43 bp, Artificial Sequence
  primer
gtaaaacgacggccagtcctagttctggaagataccaataagc

SEQ ID NO: 109919 - DNA, 44 bp, Artificial Sequence
  primer
gtaaaacgacggccagttttagtcaggactggaatcttaaacag

SEQ ID NO: 109920 - DNA, 23 bp, Artificial Sequence
  primer
tgctgatactggaaccatctacc

SEQ ID NO: 109921 - DNA, 38 bp, Artificial Sequence
  primer
gtaaaacgacggccagttggtggagaatccaaacattc

SEQ ID NO: 109922 - DNA, 38 bp, Artificial Sequence
  primer
gtaaaacgacggccagtactgcttgccttccttgtttc

SEQ ID NO: 109923 - DNA, 38 bp, Artificial Sequence
  primer
gtaaaacgacggccagttctggcaatggcaaatttatg

SEQ ID NO: 109924 - DNA, 21 bp, Artificial Sequence
  primer
atcaccaccagtacatgccag

SEQ ID NO: 109925 - DNA, 38 bp, Artificial Sequence
  primer
gtaaaacgacggccagtgcacaccctctaatgcctttc

SEQ ID NO: 109926 - DNA, 21 bp, Artificial Sequence
  primer
ttctgctttcctcttgcactg

SEQ ID NO: 109927 - DNA, 44 bp, Artificial Sequence
  primer
gtaaaacgacggccagttgcttcagattctgtattaataaggtg

SEQ ID NO: 109928 - DNA, 43 bp, Artificial Sequence
  primer
gtaaaacgacggccagtgagtattgacatttcaacttaccagg

SEQ ID NO: 109929 - DNA, 37 bp, Artificial Sequence
  primer
gtaaaacgacggccagtcacacacacacacaatgggc

SEQ ID NO: 109930 - DNA, 24 bp, Artificial Sequence
  primer
aaactgaaacttgacatcaactcg

SEQ ID NO: 109931 - DNA, 25 bp, Artificial Sequence
  primer
catctctgattctataattgggcac

SEQ ID NO: 109932 - DNA, 23 bp, Artificial Sequence
  primer
caaacagcatccctctgataaag

SEQ ID NO: 109933 - DNA, 40 bp, Artificial Sequence
  primer
gtaaaacgacggccagtgcaagagtagaaactgaaagggc

SEQ ID NO: 109934 - DNA, 39 bp, Artificial Sequence
  primer
gtaaaacgacggccagttggtgggcatatgaattactct

SEQ ID NO: 109935 - DNA, 25 bp, Artificial Sequence
  primer
actgatcacaaagtgaaatgatctg

SEQ ID NO: 109936 - DNA, 19 bp, Artificial Sequence
  primer
gctgagaggcattcagcac

SEQ ID NO: 109937 - DNA, 22 bp, Artificial Sequence
  primer
tgactccaagaatgacaggttg

SEQ ID NO: 109938 - DNA, 20 bp, Artificial Sequence
  primer
ggtggcttgtgccaataatc

SEQ ID NO: 109939 - DNA, 37 bp, Artificial Sequence
  primer
gtaaaacgacggccagtatgaaccaccacacctagcc

SEQ ID NO: 109940 - DNA, 38 bp, Artificial Sequence
  primer
gtaaaacgacggccagtacttacaatgggcaccacctg

SEQ ID NO: 109941 - DNA, 38 bp, Artificial Sequence
  primer
gtaaaacgacggccagttctgggaacaactgcttcttg

SEQ ID NO: 109942 - DNA, 21 bp, Artificial Sequence
  primer
tgtcttcagcagggtttatgg

SEQ ID NO: 109943 - DNA, 38 bp, Artificial Sequence
  primer
gtaaaacgacggccagtaacaaactctttcccaccagc

SEQ ID NO: 109944 - DNA, 37 bp, Artificial Sequence
  primer
gtaaaacgacggccagtgtggagcatctgactgcaaa

SEQ ID NO: 109945 - DNA, 37 bp, Artificial Sequence
  primer
gtaaaacgacggccagttggcacgtacctgttatccc

SEQ ID NO: 109946 - DNA, 38 bp, Artificial Sequence
  primer
gtaaaacgacggccagtcatttaacaggtggagagccg

SEQ ID NO: 109947 - DNA, 20 bp, Artificial Sequence
  primer
ttagctaggcatggtggctc

SEQ ID NO: 109948 - DNA, 38 bp, Artificial Sequence
  primer
gtaaaacgacggccagtaaatggaagccctgacctttc

SEQ ID NO: 109949 - DNA, 42 bp, Artificial Sequence
  primer
gtaaaacgacggccagtgcttaggctagactgtgcttaaatg

SEQ ID NO: 109950 - DNA, 40 bp, Artificial Sequence
  primer
gtaaaacgacggccagtcagagatgcttctgagagtcagg

SEQ ID NO: 109951 - DNA, 39 bp, Artificial Sequence
  primer
gtaaaacgacggccagtcattcaggcaaactctcctttg

SEQ ID NO: 109952 - DNA, 37 bp, Artificial Sequence
  primer
gtaaaacgacggccagtcttctcccagacccaagctc

SEQ ID NO: 109953 - DNA, 38 bp, Artificial Sequence
  primer
gtaaaacgacggccagtttgactgggaagaattctggg

SEQ ID NO: 109954 - DNA, 21 bp, Artificial Sequence
  primer
agcttctggagttgagggaac

SEQ ID NO: 109955 - DNA, 39 bp, Artificial Sequence
  primer
gtaaaacgacggccagtcacccaaccaggttatttgaac

SEQ ID NO: 109956 - DNA, 22 bp, Artificial Sequence
  primer
tcctcattaggtggcactgtct

SEQ ID NO: 109957 - DNA, 27 bp, Artificial Sequence
  primer
ttggtacatagtactcttggccttatc

SEQ ID NO: 109958 - DNA, 21 bp, Artificial Sequence
  primer
tccaggcatgtagcttgtagc

SEQ ID NO: 109959 - DNA, 21 bp, Artificial Sequence
  primer
tttgctggaaataaggttggc

SEQ ID NO: 109960 - DNA, 40 bp, Artificial Sequence
  primer
gtaaaacgacggccagtgaaacaacaacagcagtgaaatg

SEQ ID NO: 109961 - DNA, 37 bp, Artificial Sequence
  primer
gtaaaacgacggccagtaagagcttcctgcttcccag

SEQ ID NO: 109962 - DNA, 39 bp, Artificial Sequence
  primer
gtaaaacgacggccagtcacattgcagttaggtttccag

SEQ ID NO: 109963 - DNA, 21 bp, Artificial Sequence
  primer
ccctgtggaggaattgaactg

SEQ ID NO: 109964 - DNA, 21 bp, Artificial Sequence
  primer
gacggttccagctgttaggag

SEQ ID NO: 109965 - DNA, 21 bp, Artificial Sequence
  primer
gtctgtgcatacttgcgtgtg

SEQ ID NO: 109966 - DNA, 38 bp, Artificial Sequence
  primer
gtaaaacgacggccagtacaagaagaaactgtggcacg

SEQ ID NO: 109967 - DNA, 19 bp, Artificial Sequence
  primer
gccctggcctcttagtgtg

SEQ ID NO: 109968 - DNA, 38 bp, Artificial Sequence
  primer
gtaaaacgacggccagtactagcaggacggttccaaag

SEQ ID NO: 109969 - DNA, 36 bp, Artificial Sequence
  primer
gtaaaacgacggccagtggcctcagagcccagttta

SEQ ID NO: 109970 - DNA, 38 bp, Artificial Sequence
  primer
gtaaaacgacggccagttgcacactgggaggagttaag

SEQ ID NO: 109971 - DNA, 21 bp, Artificial Sequence
  primer
atatttctgccgtccctggag

SEQ ID NO: 109972 - DNA, 40 bp, Artificial Sequence
  primer
gtaaaacgacggccagtcacaactgacaaatcaaacttgc

SEQ ID NO: 109973 - DNA, 38 bp, Artificial Sequence
  primer
gtaaaacgacggccagtgtgctgtttcgaggtaagctg

SEQ ID NO: 109974 - DNA, 38 bp, Artificial Sequence
  primer
gtaaaacgacggccagtttgctgctgctgtcttagagg

SEQ ID NO: 109975 - DNA, 21 bp, Artificial Sequence
  primer
ttacctcacctgtctccgagc

SEQ ID NO: 109976 - DNA, 21 bp, Artificial Sequence
  primer
actttctcactatggcacccg

SEQ ID NO: 109977 - DNA, 20 bp, Artificial Sequence
  primer
acaggtgtgagccactttgc

SEQ ID NO: 109978 - DNA, 38 bp, Artificial Sequence
  primer
gtaaaacgacggccagtaacaaggatctgctggtgatg

SEQ ID NO: 109979 - DNA, 20 bp, Artificial Sequence
  primer
aagtcctgagtctgacgccc

SEQ ID NO: 109980 - DNA, 40 bp, Artificial Sequence
  primer
gtaaaacgacggccagtggtattcccttcttcgtgtcaac

SEQ ID NO: 109981 - DNA, 38 bp, Artificial Sequence
  primer
gtaaaacgacggccagttaccaaatgcaaacacaatgg

SEQ ID NO: 109982 - DNA, 37 bp, Artificial Sequence
  primer
gtaaaacgacggccagtgaaactgcggcaagttgttc

SEQ ID NO: 109983 - DNA, 20 bp, Artificial Sequence
  primer
ggaaggaacagcatccacag

SEQ ID NO: 109984 - DNA, 21 bp, Artificial Sequence
  primer
ttctgaaatcccgctttcttg

SEQ ID NO: 109985 - DNA, 38 bp, Artificial Sequence
  primer
gtaaaacgacggccagtctctgacaatgggtggaggtc

SEQ ID NO: 109986 - DNA, 21 bp, Artificial Sequence
  primer
ttgtcttgggagtgtggactg

SEQ ID NO: 109987 - DNA, 21 bp, Artificial Sequence
  primer
agggacaggatcttgctatgc

SEQ ID NO: 109988 - DNA, 37 bp, Artificial Sequence
  primer
gtaaaacgacggccagtgtgacaccaagcctggctac

SEQ ID NO: 109989 - DNA, 38 bp, Artificial Sequence
  primer
gtaaaacgacggccagtggccttggctgagtctttatc

SEQ ID NO: 109990 - DNA, 39 bp, Artificial Sequence
  primer
gtaaaacgacggccagtaaggcagaaacattgaaggaaa

SEQ ID NO: 109991 - DNA, 37 bp, Artificial Sequence
  primer
gtaaaacgacggccagtaaatgaggaaattccgggtg

SEQ ID NO: 109992 - DNA, 21 bp, Artificial Sequence
  primer
tttagggcgtcctctgtatga

SEQ ID NO: 109993 - DNA, 36 bp, Artificial Sequence
  primer
gtaaaacgacggccagtctgcagacatagcatgcgg

SEQ ID NO: 109994 - DNA, 21 bp, Artificial Sequence
  primer
gcactcaagttctggaaaggg

SEQ ID NO: 109995 - DNA, 23 bp, Artificial Sequence
  primer
ccactcaatgttctgaaacacag

SEQ ID NO: 109996 - DNA, 21 bp, Artificial Sequence
  primer
aggaatcgccaaatcttcgag

SEQ ID NO: 109997 - DNA, 21 bp, Artificial Sequence
  primer
cctgaagctcctttccaactc

SEQ ID NO: 109998 - DNA, 22 bp, Artificial Sequence
  primer
cagccctgcttcaaatcataag

SEQ ID NO: 109999 - DNA, 40 bp, Artificial Sequence
  primer
gtaaaacgacggccagtcaagtaacattcctgtgctttgg

SEQ ID NO: 110000 - DNA, 40 bp, Artificial Sequence
  primer
gtaaaacgacggccagtagaacatatgcaactcttcctgc

SEQ ID NO: 110001 - DNA, 38 bp, Artificial Sequence
  primer
gtaaaacgacggccagtgtaaggcttgaggagacaccc

SEQ ID NO: 110002 - DNA, 20 bp, Artificial Sequence
  primer
cccggagtgataatgattgg

SEQ ID NO: 110003 - DNA, 23 bp, Artificial Sequence
  primer
tggtcaccataccacctaatttc

SEQ ID NO: 110004 - DNA, 38 bp, Artificial Sequence
  primer
gtaaaacgacggccagtgactgtgcatgggatgtaagc

SEQ ID NO: 110005 - DNA, 38 bp, Artificial Sequence
  primer
gtaaaacgacggccagtcgtgagaaagagggcagtcag

SEQ ID NO: 110006 - DNA, 21 bp, Artificial Sequence
  primer
caacctcaagagcctaatggg

SEQ ID NO: 110007 - DNA, 22 bp, Artificial Sequence
  primer
gagtgagcccgctagtttattc

SEQ ID NO: 110008 - DNA, 38 bp, Artificial Sequence
  primer
gtaaaacgacggccagtttgcctttcaaagcctaatct

SEQ ID NO: 110009 - DNA, 21 bp, Artificial Sequence
  primer
ttacttcccactgccataccc

SEQ ID NO: 110010 - DNA, 22 bp, Artificial Sequence
  primer
tgtactggtgatttgccaagag

SEQ ID NO: 110011 - DNA, 39 bp, Artificial Sequence
  primer
gtaaaacgacggccagtcaccacatgcataagaaacagc

SEQ ID NO: 110012 - DNA, 38 bp, Artificial Sequence
  primer
gtaaaacgacggccagtacctgggtttccttccagttc

SEQ ID NO: 110013 - DNA, 22 bp, Artificial Sequence
  primer
gcacacatcacattgttcacac

SEQ ID NO: 110014 - DNA, 21 bp, Artificial Sequence
  primer
tgaaagcttcggctaaaggtc

SEQ ID NO: 110015 - DNA, 39 bp, Artificial Sequence
  primer
gtaaaacgacggccagtgcggaaactacagctaagcatc

SEQ ID NO: 110016 - DNA, 38 bp, Artificial Sequence
  primer
gtaaaacgacggccagtagttgacaggcgtccactgag

SEQ ID NO: 110017 - DNA, 21 bp, Artificial Sequence
  primer
agagacaaggccaggaaattg

SEQ ID NO: 110018 - DNA, 38 bp, Artificial Sequence
  primer
gtaaaacgacggccagtacgggaaatatcttgcaaagc

SEQ ID NO: 110019 - DNA, 21 bp, Artificial Sequence
  primer
gcatcacaaggaggagacaag

SEQ ID NO: 110020 - DNA, 41 bp, Artificial Sequence
  primer
gtaaaacgacggccagtgagacagtaaggaagatttgaggc

SEQ ID NO: 110021 - DNA, 38 bp, Artificial Sequence
  primer
gtaaaacgacggccagttcagctgagctccagcctatc

SEQ ID NO: 110022 - DNA, 21 bp, Artificial Sequence
  primer
ctaccttccactctcccaacc

SEQ ID NO: 110023 - DNA, 21 bp, Artificial Sequence
  primer
gggtatccctcctctttctcc

SEQ ID NO: 110024 - DNA, 38 bp, Artificial Sequence
  primer
gtaaaacgacggccagtcagaaagcctccttcttaggg

SEQ ID NO: 110025 - DNA, 21 bp, Artificial Sequence
  primer
acctgggtatggacactgagc

SEQ ID NO: 110026 - DNA, 39 bp, Artificial Sequence
  primer
gtaaaacgacggccagtccgaccaggtagacagatgaag

SEQ ID NO: 110027 - DNA, 21 bp, Artificial Sequence
  primer
tacacgtgccctcatacatcc

SEQ ID NO: 110028 - DNA, 20 bp, Artificial Sequence
  primer
ttcaagacacagcgggtagc

SEQ ID NO: 110029 - DNA, 21 bp, Artificial Sequence
  primer
gtatgttccaggctccagctc

SEQ ID NO: 110030 - DNA, 22 bp, Artificial Sequence
  primer
tgcttgagctgataactggatg

SEQ ID NO: 110031 - DNA, 21 bp, Artificial Sequence
  primer
ctgttgcctcacaacttccag

SEQ ID NO: 110032 - DNA, 20 bp, Artificial Sequence
  primer
agcatccacctgtgttacgg

SEQ ID NO: 110033 - DNA, 36 bp, Artificial Sequence
  primer
gtaaaacgacggccagtctcaaaggccaagggtcac

SEQ ID NO: 110034 - DNA, 21 bp, Artificial Sequence
  primer
gatgcttcctgctggtttgtc

SEQ ID NO: 110035 - DNA, 21 bp, Artificial Sequence
  primer
atgccttgctccagtagatcc

SEQ ID NO: 110036 - DNA, 21 bp, Artificial Sequence
  primer
tattccctcagtcacaccctg

SEQ ID NO: 110037 - DNA, 20 bp, Artificial Sequence
  primer
ctgccaggcaatctcagttc

SEQ ID NO: 110038 - DNA, 38 bp, Artificial Sequence
  primer
gtaaaacgacggccagtagcaagcatgggacatacaac

SEQ ID NO: 110039 - DNA, 38 bp, Artificial Sequence
  primer
gtaaaacgacggccagtgcctgatctcttgacctgatg

SEQ ID NO: 110040 - DNA, 21 bp, Artificial Sequence
  primer
tatctgtagcctcctgcccac

SEQ ID NO: 110041 - DNA, 38 bp, Artificial Sequence
  primer
gtaaaacgacggccagtgttcagcaccacagtttccag

SEQ ID NO: 110042 - DNA, 38 bp, Artificial Sequence
  primer
gtaaaacgacggccagtatagatctgcaggagccaagg

SEQ ID NO: 110043 - DNA, 21 bp, Artificial Sequence
  primer
cttctaggcaggatggtgctc

SEQ ID NO: 110044 - DNA, 37 bp, Artificial Sequence
  primer
gtaaaacgacggccagtcccaacactcactgctttcc

SEQ ID NO: 110045 - DNA, 21 bp, Artificial Sequence
  primer
ggtatgggttaggaggcagag

SEQ ID NO: 110046 - DNA, 21 bp, Artificial Sequence
  primer
gtgtaagcatgttcctggctg

SEQ ID NO: 110047 - DNA, 38 bp, Artificial Sequence
  primer
gtaaaacgacggccagtggctccattcctactcttccc

SEQ ID NO: 110048 - DNA, 38 bp, Artificial Sequence
  primer
gtaaaacgacggccagtgtaagaggtgctaggaggccc

SEQ ID NO: 110049 - DNA, 21 bp, Artificial Sequence
  primer
ctgggaagagcttctgtggtg

SEQ ID NO: 110050 - DNA, 38 bp, Artificial Sequence
  primer
gtaaaacgacggccagtaattgctgtctagcacagggc

SEQ ID NO: 110051 - DNA, 38 bp, Artificial Sequence
  primer
gtaaaacgacggccagtctccaattctggaggagaggg

SEQ ID NO: 110052 - DNA, 22 bp, Artificial Sequence
  primer
ggaagagcttaacccacgtttc

SEQ ID NO: 110053 - DNA, 21 bp, Artificial Sequence
  primer
aggcacaagaggtcagtaccc

SEQ ID NO: 110054 - DNA, 22 bp, Artificial Sequence
  primer
gcatacccgcttattgctgtag

SEQ ID NO: 110055 - DNA, 20 bp, Artificial Sequence
  primer
gatctaggcccaaggcagtc

SEQ ID NO: 110056 - DNA, 21 bp, Artificial Sequence
  primer
aggctctccagaacaaacagc

SEQ ID NO: 110057 - DNA, 20 bp, Artificial Sequence
  primer
ccaggcagggaatctttctc

SEQ ID NO: 110058 - DNA, 38 bp, Artificial Sequence
  primer
gtaaaacgacggccagtcttctctgccacttagcaccc

SEQ ID NO: 110059 - DNA, 20 bp, Artificial Sequence
  primer
ggaaacagtgcaagactccg

SEQ ID NO: 110060 - DNA, 21 bp, Artificial Sequence
  primer
ttctcccatctttcctggttc

SEQ ID NO: 110061 - DNA, 21 bp, Artificial Sequence
  primer
tgggacaagcatcatgaagag

SEQ ID NO: 110062 - DNA, 38 bp, Artificial Sequence
  primer
gtaaaacgacggccagtaatctcgttcacctttcccag

SEQ ID NO: 110063 - DNA, 20 bp, Artificial Sequence
  primer
cagtgccctgactttccaag

SEQ ID NO: 110064 - DNA, 21 bp, Artificial Sequence
  primer
ctgaccaaactgcatggctac

SEQ ID NO: 110065 - DNA, 21 bp, Artificial Sequence
  primer
ttcacattgaaagcaggatgg

SEQ ID NO: 110066 - DNA, 38 bp, Artificial Sequence
  primer
gtaaaacgacggccagtcacatgcaagaagaacccttg

SEQ ID NO: 110067 - DNA, 19 bp, Artificial Sequence
  primer
gcggagaacaggactggag

SEQ ID NO: 110068 - DNA, 21 bp, Artificial Sequence
  primer
aatgaactgaagggctagggc

SEQ ID NO: 110069 - DNA, 21 bp, Artificial Sequence
  primer
agggcttgtatccaccagaag

SEQ ID NO: 110070 - DNA, 21 bp, Artificial Sequence
  primer
ccacacaacctgaaacacagg

SEQ ID NO: 110071 - DNA, 38 bp, Artificial Sequence
  primer
gtaaaacgacggccagtcaagtccctttacctccctgg

SEQ ID NO: 110072 - DNA, 21 bp, Artificial Sequence
  primer
ggaacaggcaaacataggtgg

SEQ ID NO: 110073 - DNA, 38 bp, Artificial Sequence
  primer
gtaaaacgacggccagtcccagagtacagagaggtggg

SEQ ID NO: 110074 - DNA, 21 bp, Artificial Sequence
  primer
ttagggacagcacccattagg

SEQ ID NO: 110075 - DNA, 21 bp, Artificial Sequence
  primer
tgctcctcctttccaagtgac

SEQ ID NO: 110076 - DNA, 21 bp, Artificial Sequence
  primer
aacctcttgacctcgtgatcc

SEQ ID NO: 110077 - DNA, 38 bp, Artificial Sequence
  primer
gtaaaacgacggccagttgaatttagctcctatcgccc

SEQ ID NO: 110078 - DNA, 26 bp, Artificial Sequence
  primer
tttcaatgtcttacaatgagaagcac

SEQ ID NO: 110079 - DNA, 40 bp, Artificial Sequence
  primer
gtaaaacgacggccagtcctctctctgatatccaccattc

SEQ ID NO: 110080 - DNA, 21 bp, Artificial Sequence
  primer
aatttctcacggatccacctg

SEQ ID NO: 110081 - DNA, 21 bp, Artificial Sequence
  primer
cgaagcattactgcctttacg

SEQ ID NO: 110082 - DNA, 22 bp, Artificial Sequence
  primer
cattagtcagacaccagccaca

SEQ ID NO: 110083 - DNA, 21 bp, Artificial Sequence
  primer
tgtgtccctgatcccaatacc

SEQ ID NO: 110084 - DNA, 38 bp, Artificial Sequence
  primer
gtaaaacgacggccagttggatcctgtgccaaatacac

SEQ ID NO: 110085 - DNA, 40 bp, Artificial Sequence
  primer
gtaaaacgacggccagttgctgactagatgtggaaaggag

SEQ ID NO: 110086 - DNA, 22 bp, Artificial Sequence
  primer
tggtgtttatctctggtggtgg

SEQ ID NO: 110087 - DNA, 38 bp, Artificial Sequence
  primer
gtaaaacgacggccagtaacaaggcctaatgaagcagc

SEQ ID NO: 110088 - DNA, 20 bp, Artificial Sequence
  primer
cttctgagtcgccaccattg

SEQ ID NO: 110089 - DNA, 24 bp, Artificial Sequence
  primer
gcctccatcacactacattctttc

SEQ ID NO: 110090 - DNA, 21 bp, Artificial Sequence
  primer
ccgagcgtcaaagattctagg

SEQ ID NO: 110091 - DNA, 37 bp, Artificial Sequence
  primer
gtaaaacgacggccagtacccagcctggatgacctac

SEQ ID NO: 110092 - DNA, 21 bp, Artificial Sequence
  primer
agttcgccagctattgtagcc

SEQ ID NO: 110093 - DNA, 38 bp, Artificial Sequence
  primer
gtaaaacgacggccagtagaattccaggcacgagtcac

SEQ ID NO: 110094 - DNA, 39 bp, Artificial Sequence
  primer
gtaaaacgacggccagttccattagtttcctctcaaccc

SEQ ID NO: 110095 - DNA, 38 bp, Artificial Sequence
  primer
gtaaaacgacggccagtctctcccatttggtttcttgc

SEQ ID NO: 110096 - DNA, 21 bp, Artificial Sequence
  primer
tcagttctccactggtgttgg

SEQ ID NO: 110097 - DNA, 37 bp, Artificial Sequence
  primer
gtaaaacgacggccagtgccgcagagtaggaaatgac

SEQ ID NO: 110098 - DNA, 37 bp, Artificial Sequence
  primer
gtaaaacgacggccagtaaacctccacgtgtgagacc

SEQ ID NO: 110099 - DNA, 39 bp, Artificial Sequence
  primer
gtaaaacgacggccagtgggtagtattatgaccacgccc

SEQ ID NO: 110100 - DNA, 38 bp, Artificial Sequence
  primer
gtaaaacgacggccagttttcatggctggtcaagaatg

SEQ ID NO: 110101 - DNA, 19 bp, Artificial Sequence
  primer
accagaaccctggaagtgc

SEQ ID NO: 110102 - DNA, 22 bp, Artificial Sequence
  primer
gcggagagtacagacgcataag

SEQ ID NO: 110103 - DNA, 22 bp, Artificial Sequence
  primer
ggtgacagagcaagaccgtatc

SEQ ID NO: 110104 - DNA, 38 bp, Artificial Sequence
  primer
gtaaaacgacggccagtctagaccttaccgatgggacc

SEQ ID NO: 110105 - DNA, 39 bp, Artificial Sequence
  primer
gtaaaacgacggccagtgatagagagggaggcactcttg

SEQ ID NO: 110106 - DNA, 20 bp, Artificial Sequence
  primer
atccatgcttccgatcttcc

SEQ ID NO: 110107 - DNA, 38 bp, Artificial Sequence
  primer
gtaaaacgacggccagttttcaaagcaaccgaagaatg

SEQ ID NO: 110108 - DNA, 40 bp, Artificial Sequence
  primer
gtaaaacgacggccagtaagagtccgtcaacaagaaatga

SEQ ID NO: 110109 - DNA, 22 bp, Artificial Sequence
  primer
ggactctgggatatccagtcag

SEQ ID NO: 110110 - DNA, 21 bp, Artificial Sequence
  primer
ggtttcatggagacacagtgg

SEQ ID NO: 110111 - DNA, 38 bp, Artificial Sequence
  primer
gtaaaacgacggccagttggccttaatgtgctgttgag

SEQ ID NO: 110112 - DNA, 38 bp, Artificial Sequence
  primer
gtaaaacgacggccagtaccaatagccctgttggacac

SEQ ID NO: 110113 - DNA, 21 bp, Artificial Sequence
  primer
ggtttcatggagacacagtgg

SEQ ID NO: 110114 - DNA, 20 bp, Artificial Sequence
  primer
atccatgcttccgatcttcc

SEQ ID NO: 110115 - DNA, 38 bp, Artificial Sequence; identical to SEQ ID NO: 110107
  primer

SEQ ID NO: 110116 - DNA, 20 bp, Artificial Sequence
  primer
gacaaggctgtcaagatccg

SEQ ID NO: 110117 - DNA, 20 bp, Artificial Sequence
  primer
catttcggcctctttctgag

SEQ ID NO: 110118 - DNA, 38 bp, Artificial Sequence
  primer
gtaaaacgacggccagtcctggtcagagattagggctg

SEQ ID NO: 110119 - DNA, 21 bp, Artificial Sequence
  primer
atggttagttactgcccgctg

SEQ ID NO: 110120 - DNA, 21 bp, Artificial Sequence
  primer
gcctacgaagaggaacccaag

SEQ ID NO: 110121 - DNA, 21 bp, Artificial Sequence
  primer
gggtttactgcattcactcgg

SEQ ID NO: 110122 - DNA, 20 bp, Artificial Sequence
  primer
gcatagaggaaggaggctgc

SEQ ID NO: 110123 - DNA, 39 bp, Artificial Sequence
  primer
gtaaaacgacggccagtgcagcagaatcaggtttattgg

SEQ ID NO: 110124 - DNA, 38 bp, Artificial Sequence
  primer
gtaaaacgacggccagtaatgaaagccagtcatgggtc

SEQ ID NO: 110125 - DNA, 21 bp, Artificial Sequence
  primer
aacccaagccaataattcagc

SEQ ID NO: 110126 - DNA, 38 bp, Artificial Sequence
  primer
gtaaaacgacggccagtaataaggaaaccactccctgc

SEQ ID NO: 110127 - DNA, 38 bp, Artificial Sequence
  primer
gtaaaacgacggccagtgggtggagaaatttcagggtc

SEQ ID NO: 110128 - DNA, 21 bp, Artificial Sequence
  primer
gtcactgttgacagctctggg

SEQ ID NO: 110129 - DNA, 21 bp, Artificial Sequence
  primer
cagaattcaagctcctcaggg

SEQ ID NO: 110130 - DNA, 21 bp, Artificial Sequence
  primer
cagctcaatcctaatccaccc

SEQ ID NO: 110131 - DNA, 38 bp, Artificial Sequence
  primer
gtaaaacgacggccagtttgtgaactactagcccgagg

SEQ ID NO: 110132 - DNA, 22 bp, Artificial Sequence
  primer
cctaggtgacagcgagactctg

SEQ ID NO: 110133 - DNA, 39 bp, Artificial Sequence
  primer
gtaaaacgacggccagtgcccagtgaagctgaattattg

SEQ ID NO: 110134 - DNA, 21 bp, Artificial Sequence
  primer
ccaaccctgcttgttactccc

SEQ ID NO: 110135 - DNA, 21 bp, Artificial Sequence
  primer
gaggctcctattggtcactcc

SEQ ID NO: 110136 - DNA, 21 bp, Artificial Sequence
  primer
cacagcttaggtaccacctcg

SEQ ID NO: 110137 - DNA, 38 bp, Artificial Sequence
  primer
gtaaaacgacggccagtataggagaagagggcacggag

SEQ ID NO: 110138 - DNA, 21 bp, Artificial Sequence
  primer
atctcagctcctcggtgattg

SEQ ID NO: 110139 - DNA, 21 bp, Artificial Sequence
  primer
ggagagcgaagggaggtattc

SEQ ID NO: 110140 - DNA, 21 bp, Artificial Sequence
  primer
ttcatgtaagatggacagccc

SEQ ID NO: 110141 - DNA, 21 bp, Artificial Sequence
  primer
gaaggtacccttccttcctcc

SEQ ID NO: 110142 - DNA, 21 bp, Artificial Sequence
  primer
tggttctgagagggaggattc

SEQ ID NO: 110143 - DNA, 21 bp, Artificial Sequence
  primer
gcgtacagggacgactctttc

SEQ ID NO: 110144 - DNA, 20 bp, Artificial Sequence
  primer
ttcaagacatcctgggcaac

SEQ ID NO: 110145 - DNA, 21 bp, Artificial Sequence
  primer
tcccttgggtcttgagtgaac

SEQ ID NO: 110146 - DNA, 21 bp, Artificial Sequence
  primer
aacccagacatgccagttagc

SEQ ID NO: 110147 - DNA, 38 bp, Artificial Sequence
  primer
gtaaaacgacggccagtcaccttcaataataccgagcg

SEQ ID NO: 110148 - DNA, 21 bp, Artificial Sequence
  primer
aacaggcatctgtgaatctcc

SEQ ID NO: 110149 - DNA, 21 bp, Artificial Sequence
  primer
attcccagagttgaggtgtgg

SEQ ID NO: 110150 - DNA, 21 bp, Artificial Sequence
  primer
ttgctgaatgaaccacaaagg

SEQ ID NO: 110151 - DNA, 21 bp, Artificial Sequence
  primer
tatcactgggattcatgaggg

SEQ ID NO: 110152 - DNA, 21 bp, Artificial Sequence
  primer
cttgatctgctttcctctggc

SEQ ID NO: 110153 - DNA, 21 bp, Artificial Sequence
  primer
acccatcagttcggtttcttc

SEQ ID NO: 110154 - DNA, 38 bp, Artificial Sequence
  primer
gtaaaacgacggccagttccagtggtgctctgtactgc

SEQ ID NO: 110155 - DNA, 21 bp, Artificial Sequence
  primer
agaggaaggaatccaaggctc

SEQ ID NO: 110156 - DNA, 38 bp, Artificial Sequence
  primer
gtaaaacgacggccagtgatggagcgaggaatgatctc

SEQ ID NO: 110157 - DNA, 22 bp, Artificial Sequence
  primer
aaagcagaaccctgggactaag

SEQ ID NO: 110158 - DNA, 39 bp, Artificial Sequence
  primer
gtaaaacgacggccagtaaggctttgaggtaagggtttg

SEQ ID NO: 110159 - DNA, 21 bp, Artificial Sequence
  primer
aaacactgggacacttcctgg

SEQ ID NO: 110160 - DNA, 21 bp, Artificial Sequence
  primer
aagccgaaagccttcactacc

SEQ ID NO: 110161 - DNA, 38 bp, Artificial Sequence
  primer
gtaaaacgacggccagtcctcctaggacagtctgccac

SEQ ID NO: 110162 - DNA, 39 bp, Artificial Sequence
  primer
gtaaaacgacggccagtgctctctgaaacctcacaatgg

SEQ ID NO: 110163 - DNA, 21 bp, Artificial Sequence
  primer
ggttcaacctcagtttccgag

SEQ ID NO: 110164 - DNA, 38 bp, Artificial Sequence
  primer
gtaaaacgacggccagttactgggctggcttatccttc

SEQ ID NO: 110165 - DNA, 21 bp, Artificial Sequence
  primer
gagcacctgaacctgacacag

SEQ ID NO: 110166 - DNA, 20 bp, Artificial Sequence
  primer
taatgtgctgcagcctcctc

SEQ ID NO: 110167 - DNA, 38 bp, Artificial Sequence
  primer
gtaaaacgacggccagtagcttccgggtaatgtgactc

SEQ ID NO: 110168 - DNA, 21 bp, Artificial Sequence
  primer
cttggaactgaggaggagagg

SEQ ID NO: 110169 - DNA, 21 bp, Artificial Sequence
  primer
ccttcagctcattcccaagtc

SEQ ID NO: 110170 - DNA, 21 bp, Artificial Sequence
  primer
tcctgttacctagcgggagag

SEQ ID NO: 110171 - DNA, 21 bp, Artificial Sequence
  primer
caagccatcatctaatttggg

SEQ ID NO: 110172 - DNA, 36 bp, Artificial Sequence
  primer
gtaaaacgacggccagttacaggtgcgaaccactgc

SEQ ID NO: 110173 - DNA, 38 bp, Artificial Sequence
  primer
gtaaaacgacggccagtcaggttgggttaaggaaatgg

SEQ ID NO: 110174 - DNA, 38 bp, Artificial Sequence
  primer
gtaaaacgacggccagtcagagaagagctcggttcagg

SEQ ID NO: 110175 - DNA, 21 bp, Artificial Sequence
  primer
gacgtagtggcttccacactg

SEQ ID NO: 110176 - DNA, 38 bp, Artificial Sequence
  primer
gtaaaacgacggccagttaagagatgctctgtgctcgg

SEQ ID NO: 110177 - DNA, 21 bp, Artificial Sequence
  primer
ctcctcctactcacccattgc

SEQ ID NO: 110178 - DNA, 21 bp, Artificial Sequence
  primer
tgtctcccagccatcttcttc

SEQ ID NO: 110179 - DNA, 21 bp, Artificial Sequence
  primer
cctttaacaaatcgccacctc

SEQ ID NO: 110180 - DNA, 21 bp, Artificial Sequence
  primer
ctccaacctgactgccatagg

SEQ ID NO: 110181 - DNA, 38 bp, Artificial Sequence
  primer
gtaaaacgacggccagtatcctttctcctccctgcaac

SEQ ID NO: 110182 - DNA, 21 bp, Artificial Sequence
  primer
gaagcatgagtgcctctttcc

SEQ ID NO: 110183 - DNA, 21 bp, Artificial Sequence
  primer
atttggaaggatgctgtttgg

SEQ ID NO: 110184 - DNA, 20 bp, Artificial Sequence
  primer
gattacaagaatgcgccacc

SEQ ID NO: 110185 - DNA, 38 bp, Artificial Sequence
  primer
gtaaaacgacggccagttgggcaaaccatcacaatatg

SEQ ID NO: 110186 - DNA, 21 bp, Artificial Sequence
  primer
tgaggaagtcggaattggttc

SEQ ID NO: 110187 - DNA, 21 bp, Artificial Sequence
  primer
ggcagcaagcagtgagctaag

SEQ ID NO: 110188 - DNA, 21 bp, Artificial Sequence
  primer
ttggatatggatggtcttccc

SEQ ID NO: 110189 - DNA, 37 bp, Artificial Sequence
  primer
gtaaaacgacggccagtgggaggagatgtgtgacagc

SEQ ID NO: 110190 - DNA, 20 bp, Artificial Sequence
  primer
gagctgagattgtgccattg

SEQ ID NO: 110191 - DNA, 20 bp, Artificial Sequence
  primer
catctctggagagccagtgc

SEQ ID NO: 110192 - DNA, 37 bp, Artificial Sequence
  primer
gtaaaacgacggccagtcaggaggacactcttgccac

SEQ ID NO: 110193 - DNA, 21 bp, Artificial Sequence
  primer
tgcatttcaactcccaagaag

SEQ ID NO: 110194 - DNA, 35 bp, Artificial Sequence
  primer
gtaaaacgacggccagttcccagctcggagaggag

SEQ ID NO: 110195 - DNA, 38 bp, Artificial Sequence
  primer
gtaaaacgacggccagtataggtttgggctgacagtcg

SEQ ID NO: 110196 - DNA, 38 bp, Artificial Sequence
  primer
gtaaaacgacggccagtcctaggaccaaggattgaggg

SEQ ID NO: 110197 - DNA, 21 bp, Artificial Sequence
  primer
cccaatcttcttgaaagtgcc

SEQ ID NO: 110198 - DNA, 38 bp, Artificial Sequence
  primer
gtaaaacgacggccagtgtgtacccaacctcttagccc

SEQ ID NO: 110199 - DNA, 40 bp, Artificial Sequence
  primer
gtaaaacgacggccagttcaaacagagtctgcctttaagc

SEQ ID NO: 110200 - DNA, 21 bp, Artificial Sequence
  primer
ccacaggcgatcaaatttagg

SEQ ID NO: 110201 - DNA, 41 bp, Artificial Sequence
  primer
gtaaaacgacggccagtgaagggttatctgtcctaggtttg

SEQ ID NO: 110202 - DNA, 38 bp, Artificial Sequence
  primer
gtaaaacgacggccagtatcactgtgcctgtcttgcag

SEQ ID NO: 110203 - DNA, 21 bp, Artificial Sequence
  primer
agagagctggtcaaatctcgg

SEQ ID NO: 110204 - DNA, 21 bp, Artificial Sequence
  primer
tggtgcagactaccacaggac

SEQ ID NO: 110205 - DNA, 21 bp, Artificial Sequence
  primer
actgttccaatgccaactgtg

SEQ ID NO: 110206 - DNA, 38 bp, Artificial Sequence
  primer
gtaaaacgacggccagtcaggcgaggttcttacaaatg

SEQ ID NO: 110207 - DNA, 36 bp, Artificial Sequence
  primer
gtaaaacgacggccagtaagcagctcagcggtagga

SEQ ID NO: 110208 - DNA, 26 bp, Artificial Sequence
  primer
cctttcttcaaacaggaaatagaaag

SEQ ID NO: 110209 - DNA, 18 bp, Artificial Sequence
  primer
gtgagccactgcacccag

SEQ ID NO: 110210 - DNA, 38 bp, Artificial Sequence
  primer
gtaaaacgacggccagtcatggccacccaatgtataag

SEQ ID NO: 110211 - DNA, 39 bp, Artificial Sequence
  primer
gtaaaacgacggccagtccatggcagaagtgaatagctc

SEQ ID NO: 110212 - DNA, 21 bp, Artificial Sequence
  primer
gtctagggcagtttctccagc

SEQ ID NO: 110213 - DNA, 22 bp, Artificial Sequence
  primer
tcacctcctttaactgcattcc

SEQ ID NO: 110214 - DNA, 21 bp, Artificial Sequence
  primer
tgaacaacataaatggccctg

SEQ ID NO: 110215 - DNA, 39 bp, Artificial Sequence
  primer
gtaaaacgacggccagtgcaattcttacctcaaagctgg

SEQ ID NO: 110216 - DNA, 38 bp, Artificial Sequence
  primer
gtaaaacgacggccagtctgaatgtgctaacaggccac

SEQ ID NO: 110217 - DNA, 22 bp, Artificial Sequence
  primer
ccaagagtgaacgtctggtttc

SEQ ID NO: 110218 - DNA, 38 bp, Artificial Sequence
  primer
gtaaaacgacggccagttttgggatggatcaatgaaca

SEQ ID NO: 110219 - DNA, 21 bp, Artificial Sequence
  primer
gtccttcatctgtggtttggg

SEQ ID NO: 110220 - DNA, 38 bp, Artificial Sequence
  primer
gtaaaacgacggccagtgtgtaagttggagcacctgcc

SEQ ID NO: 110221 - DNA, 37 bp, Artificial Sequence
  primer
gtaaaacgacggccagtctgacagggtccttgtgctc

SEQ ID NO: 110222 - DNA, 22 bp, Artificial Sequence
  primer
ggcccttccatgagtttcttac

SEQ ID NO: 110223 - DNA, 37 bp, Artificial Sequence
  primer
gtaaaacgacggccagtggcttcggagcaaagaaagt

SEQ ID NO: 110224 - DNA, 39 bp, Artificial Sequence
  primer
gtaaaacgacggccagtgctggctcatttgttaatggtc

SEQ ID NO: 110225 - DNA, 24 bp, Artificial Sequence
  primer
gggtacccaaggaactatgaaatg

SEQ ID NO: 110226 - DNA, 38 bp, Artificial Sequence
  primer
gtaaaacgacggccagtatggcaaatcagaggaagctg

SEQ ID NO: 110227 - DNA, 22 bp, Artificial Sequence
  primer
cctttaagcaatacgaggttgg

SEQ ID NO: 110228 - DNA, 19 bp, Artificial Sequence
  primer
ggtaccggtgagatgctcc

SEQ ID NO: 110229 - DNA, 21 bp, Artificial Sequence
  primer
atgagtcagcacctcattccc

SEQ ID NO: 110230 - DNA, 37 bp, Artificial Sequence
  primer
gtaaaacgacggccagtcaccaagacagaggacaggc

SEQ ID NO: 110231 - DNA, 38 bp, Artificial Sequence
  primer
gtaaaacgacggccagttttactggtgcctgacacagc

SEQ ID NO: 110232 - DNA, 38 bp, Artificial Sequence
  primer
gtaaaacgacggccagtggatccttgtggataagtggg

SEQ ID NO: 110233 - DNA, 20 bp, Artificial Sequence
  primer
ggagaacaactcctgccctc

SEQ ID NO: 110234 - DNA, 38 bp, Artificial Sequence
  primer
gtaaaacgacggccagttgtttgaaatgtgaaggacgc

SEQ ID NO: 110235 - DNA, 38 bp, Artificial Sequence
  primer
gtaaaacgacggccagtcagtcacagcagacgtcattg

SEQ ID NO: 110236 - DNA, 21 bp, Artificial Sequence
  primer
gctgagctgcacttaatttcg

SEQ ID NO: 110237 - DNA, 39 bp, Artificial Sequence
  primer
gtaaaacgacggccagtttatccaaaccaatctggcaac

SEQ ID NO: 110238 - DNA, 20 bp, Artificial Sequence
  primer
agaagcaacgatggatgcac

SEQ ID NO: 110239 - DNA, 23 bp, Artificial Sequence
  primer
ggcctcctgaagtaaagtactgg

SEQ ID NO: 110240 - DNA, 21 bp, Artificial Sequence
  primer
gtacctcacacctggcagtcc

SEQ ID NO: 110241 - DNA, 38 bp, Artificial Sequence
  primer
gtaaaacgacggccagtcgcgcccaaagtctaagtaac

SEQ ID NO: 110242 - DNA, 38 bp, Artificial Sequence
  primer
gtaaaacgacggccagtagcataccttctccaaggcag

SEQ ID NO: 110243 - DNA, 38 bp, Artificial Sequence
  primer
gtaaaacgacggccagtcaggagatggtagtgggaagg

SEQ ID NO: 110244 - DNA, 21 bp, Artificial Sequence
  primer
agcccaaaggtcactgagttg

SEQ ID NO: 110245 - DNA, 19 bp, Artificial Sequence
  primer
acttggcacgtgtctgtgc

SEQ ID NO: 110246 - DNA, 37 bp, Artificial Sequence
  primer
gtaaaacgacggccagttgcaaacattcctgcagagc

SEQ ID NO: 110247 - DNA, 19 bp, Artificial Sequence
  primer
aggagaggaagagggcagg

SEQ ID NO: 110248 - DNA, 37 bp, Artificial Sequence
  primer
gtaaaacgacggccagtctgagcccttgtgaaaccac

SEQ ID NO: 110249 - DNA, 21 bp, Artificial Sequence
  primer
ggaggcaccaggaactacatc

SEQ ID NO: 110250 - DNA, 21 bp, Artificial Sequence
  primer
gggctgccatacaaacagttc

SEQ ID NO: 110251 - DNA, 35 bp, Artificial Sequence
  primer
gtaaaacgacggccagtgacacgcctgtggaggtc

SEQ ID NO: 110252 - DNA, 38 bp, Artificial Sequence
  primer
gtaaaacgacggccagtgctgttgcctaaggattccac

SEQ ID NO: 110253 - DNA, 20 bp, Artificial Sequence
  primer
gcaaattgggagaaggaagg

SEQ ID NO: 110254 - DNA, 22 bp, Artificial Sequence
  primer
catgacatgtttcacacaaggg

SEQ ID NO: 110255 - DNA, 38 bp, Artificial Sequence
  primer
gtaaaacgacggccagtgtctcggcagcatttaggttc

SEQ ID NO: 110256 - DNA, 21 bp, Artificial Sequence
  primer
ctgaagcagaatcctgggaac

SEQ ID NO: 110257 - DNA, 22 bp, Artificial Sequence
  primer
ggtctatcacaccttgagaggg

SEQ ID NO: 110258 - DNA, 21 bp, Artificial Sequence
  primer
aatatgtcaggcacagagccc

SEQ ID NO: 110259 - DNA, 21 bp, Artificial Sequence
  primer
cctgtgggtcttccttctctc

SEQ ID NO: 110260 - DNA, 22 bp, Artificial Sequence
  primer
ttagaacagttcctttgggcag

SEQ ID NO: 110261 - DNA, 38 bp, Artificial Sequence
  primer
gtaaaacgacggccagtggagggcttgacattatttgc

SEQ ID NO: 110262 - DNA, 21 bp, Artificial Sequence
  primer
gcagtagcagcaattcgacac

SEQ ID NO: 110263 - DNA, 37 bp, Artificial Sequence
  primer
gtaaaacgacggccagtcttcgtccttgctgttctgc

SEQ ID NO: 110264 - DNA, 18 bp, Artificial Sequence
  primer
aggaaagcagctggagcc

SEQ ID NO: 110265 - DNA, 19 bp, Artificial Sequence
  primer
gctacctggcttgtcccag

SEQ ID NO: 110266 - DNA, 21 bp, Artificial Sequence
  primer
tttctacgaccctggacactg

SEQ ID NO: 110267 - DNA, 21 bp, Artificial Sequence
  primer
ctgagcagatgtcagaggtgg

SEQ ID NO: 110268 - DNA, 38 bp, Artificial Sequence
  primer
gtaaaacgacggccagtagagtgctgcgtagtgcagag

SEQ ID NO: 110269 - DNA, 21 bp, Artificial Sequence
  primer
ggattagagcccgagaccatc

SEQ ID NO: 110270 - DNA, 21 bp, Artificial Sequence
  primer
atcctcctcactgtcagagcc

SEQ ID NO: 110271 - DNA, 21 bp, Artificial Sequence
  primer
aggatgaggacagcctggttc

SEQ ID NO: 110272 - DNA, 39 bp, Artificial Sequence
  primer
gtaaaacgacggccagtcggactaacatatgcactcagc

SEQ ID NO: 110273 - DNA, 21 bp, Artificial Sequence
  primer
ggtgtggaaatcaatggatgc

SEQ ID NO: 110274 - DNA, 38 bp, Artificial Sequence
  primer
gtaaaacgacggccagtacagggactgtccaaactgtg

SEQ ID NO: 110275 - DNA, 21 bp, Artificial Sequence
  primer
aggcacaagggacagagagag

SEQ ID NO: 110276 - DNA, 38 bp, Artificial Sequence
  primer
gtaaaacgacggccagtcgtcactacctcatagcggtg

SEQ ID NO: 110277 - DNA, 38 bp, Artificial Sequence
  primer
gtaaaacgacggccagtgtacaccgggtagcactctcc

SEQ ID NO: 110278 - DNA, 37 bp, Artificial Sequence
  primer
gtaaaacgacggccagtctgctcaatctccatcctgc

SEQ ID NO: 110279 - DNA, 28 bp, Artificial Sequence
  primer
tctaaacctcctgaattattatgtcaaa

SEQ ID NO: 110280 - DNA, 41 bp, Artificial Sequence
  primer
gtaaaacgacggccagtttccttgatgaacacatgtcaact

SEQ ID NO: 110281 - DNA, 37 bp, Artificial Sequence
  primer
gtaaaacgacggccagtactggaggaacatgcagtgg

SEQ ID NO: 110282 - DNA, 36 bp, Artificial Sequence
  primer
gtaaaacgacggccagtacctgccacaatccagagg

SEQ ID NO: 110283 - DNA, 25 bp, Artificial Sequence
  primer
aagggtcacaatgtctagtttgaag

SEQ ID NO: 110284 - DNA, 21 bp, Artificial Sequence
  primer
agtctccagcttgattaggca

SEQ ID NO: 110285 - DNA, 38 bp, Artificial Sequence
  primer
gtaaaacgacggccagtacaaccagaaatggcagtgtc

SEQ ID NO: 110286 - DNA, 21 bp, Artificial Sequence
  primer
ctgtgcccagctgatagattc

SEQ ID NO: 110287 - DNA, 38 bp, Artificial Sequence
  primer
gtaaaacgacggccagtacagggattaactgctgggag

SEQ ID NO: 110288 - DNA, 20 bp, Artificial Sequence
  primer
tttatacctccctgccctcc

SEQ ID NO: 110289 - DNA, 22 bp, Artificial Sequence
  primer
ccctgaaatctccgtatcttga

SEQ ID NO: 110290 - DNA, 45 bp, Artificial Sequence
  primer
gtaaaacgacggccagttggctaggtattagtgcagaagttctat

SEQ ID NO: 110291 - DNA, 21 bp, Artificial Sequence
  primer
tgtgatgcagacagaaccaaa

SEQ ID NO: 110292 - DNA, 27 bp, Artificial Sequence
  primer
aaaggttatcctacacagagtgcttag

SEQ ID NO: 110293 - DNA, 23 bp, Artificial Sequence
  primer
gtaggtggaatcacacttcttgg

SEQ ID NO: 110294 - DNA, 40 bp, Artificial Sequence
  primer
gtaaaacgacggccagttgcagctaagacaatagaccaaa

SEQ ID NO: 110295 - DNA, 21 bp, Artificial Sequence
  primer
cagggctaattaaaccaaggg

SEQ ID NO: 110296 - DNA, 38 bp, Artificial Sequence
  primer
gtaaaacgacggccagtccttccaaatttcctgaccac

SEQ ID NO: 110297 - DNA, 35 bp, Artificial Sequence
  primer
gtaaaacgacggccagtcccagccagtggtgcata

SEQ ID NO: 110298 - DNA, 25 bp, Artificial Sequence
  primer
aaagggtaggctcttagtaaacacg

SEQ ID NO: 110299 - DNA, 18 bp, Artificial Sequence
  primer
aggttgcaatgagctggg

SEQ ID NO: 110300 - DNA, 21 bp, Artificial Sequence
  primer
ctggtttatagatgagccggg

SEQ ID NO: 110301 - DNA, 24 bp, Artificial Sequence
  primer
gctccatcacttccaaatcaatac

SEQ ID NO: 110302 - DNA, 38 bp, Artificial Sequence
  primer
gtaaaacgacggccagtatactcatcctggtcaagccc

SEQ ID NO: 110303 - DNA, 38 bp, Artificial Sequence
  primer
gtaaaacgacggccagttagctaggtcatttgccttgg

SEQ ID NO: 110304 - DNA, 38 bp, Artificial Sequence
  primer
gtaaaacgacggccagttataagcctgagccaatgcac

SEQ ID NO: 110305 - DNA, 21 bp, Artificial Sequence
  primer
gcctagatcttggtgacaggc

SEQ ID NO: 110306 - DNA, 21 bp, Artificial Sequence
  primer
cgcaatgccactgaagtctac

SEQ ID NO: 110307 - DNA, 38 bp, Artificial Sequence
  primer
gtaaaacgacggccagtgacgaagcctctcttgctctc

SEQ ID NO: 110308 - DNA, 38 bp, Artificial Sequence
  primer
gtaaaacgacggccagttggctcataatggtcatctgg

SEQ ID NO: 110309 - DNA, 38 bp, Artificial Sequence
  primer
gtaaaacgacggccagtcggccaataattctctgtgtg

SEQ ID NO: 110310 - DNA, 21 bp, Artificial Sequence
  primer
aggctccctcaaggtggtaac

SEQ ID NO: 110311 - DNA, 21 bp, Artificial Sequence
  primer
tagtcccaaggccaggtttag

SEQ ID NO: 110312 - DNA, 21 bp, Artificial Sequence
  primer
gtagcaaagggagggagtgag

SEQ ID NO: 110313 - DNA, 21 bp, Artificial Sequence
  primer
ttgttcaaggttacacggcag

SEQ ID NO: 110314 - DNA, 23 bp, Artificial Sequence
  primer
cagtgtcgcttgagtctcttcac

SEQ ID NO: 110315 - DNA, 37 bp, Artificial Sequence
  primer
gtaaaacgacggccagtagatgcccaaccaatgtcag

SEQ ID NO: 110316 - DNA, 36 bp, Artificial Sequence
  primer
gtaaaacgacggccagtccatctgaacggatgcttg

SEQ ID NO: 110317 - DNA, 21 bp, Artificial Sequence
  primer
tgcaaccagcagaaacacata

SEQ ID NO: 110318 - DNA, 24 bp, Artificial Sequence
  primer
aatttaaggacatttccaggtttg

SEQ ID NO: 110319 - DNA, 20 bp, Artificial Sequence
  primer
cttctgaagcccacacttcc

SEQ ID NO: 110320 - DNA, 21 bp, Artificial Sequence
  primer
caaactgctgcggatacagac

SEQ ID NO: 110321 - DNA, 21 bp, Artificial Sequence
  primer
ccagagaagcagggtcaagag

SEQ ID NO: 110322 - DNA, 38 bp, Artificial Sequence
  primer
gtaaaacgacggccagtggattgagggtcacatcattg

SEQ ID NO: 110323 - DNA, 20 bp, Artificial Sequence
  primer
gatgggataggaagccaagg

SEQ ID NO: 110324 - DNA, 38 bp, Artificial Sequence
  primer
gtaaaacgacggccagtcttcttgatgactcggaagcc

SEQ ID NO: 110325 - DNA, 38 bp, Artificial Sequence
  primer
gtaaaacgacggccagtgctcctgcctctagtctccac

SEQ ID NO: 110326 - DNA, 20 bp, Artificial Sequence
  primer
gcagccctcgggtattctac

SEQ ID NO: 110327 - DNA, 38 bp, Artificial Sequence
  primer
gtaaaacgacggccagtcccttcaatcactgttgttcc

SEQ ID NO: 110328 - DNA, 38 bp, Artificial Sequence
  primer
gtaaaacgacggccagtttcttatttagggcaggtggg

SEQ ID NO: 110329 - DNA, 21 bp, Artificial Sequence
  primer
tctcacacccacttctgttcc

SEQ ID NO: 110330 - DNA, 20 bp, Artificial Sequence
  primer
gcagaacctctcagcagcag

SEQ ID NO: 110331 - DNA, 19 bp, Artificial Sequence
  primer
ggcagaacctctcagcagc

SEQ ID NO: 110332 - DNA, 38 bp, Artificial Sequence
  primer
gtaaaacgacggccagtcgctaccactgttcaggtcag

SEQ ID NO: 110333 - DNA, 38 bp, Artificial Sequence
  primer
gtaaaacgacggccagtggttggaacatattgggatcg

SEQ ID NO: 110334 - DNA, 36 bp, Artificial Sequence
  primer
gtaaaacgacggccagtgcttggtgctctgggctac

SEQ ID NO: 110335 - DNA, 21 bp, Artificial Sequence
  primer
tctgtgtcgcttccatcagag

SEQ ID NO: 110336 - DNA, 38 bp, Artificial Sequence
  primer
gtaaaacgacggccagtgaagcaaaggaagtctgtggg

SEQ ID NO: 110337 - DNA, 39 bp, Artificial Sequence
  primer
gtaaaacgacggccagtccctgaccctattcagacacac

SEQ ID NO: 110338 - DNA, 20 bp, Artificial Sequence
  primer
tccactttagcctgggtgac

SEQ ID NO: 110339 - DNA, 38 bp, Artificial Sequence
  primer
gtaaaacgacggccagtccgaatcctcctgcatctaag

SEQ ID NO: 110340 - DNA, 36 bp, Artificial Sequence
  primer
gtaaaacgacggccagtgagctctgagggatgccag

SEQ ID NO: 110341 - DNA, 37 bp, Artificial Sequence
  primer
gtaaaacgacggccagtaggcagcctctgtccatctc

SEQ ID NO: 110342 - DNA, 20 bp, Artificial Sequence
  primer
ctgagggcatggacacactc

SEQ ID NO: 110343 - DNA, 37 bp, Artificial Sequence
  primer
gtaaaacgacggccagtgggactataggcatgccacc

SEQ ID NO: 110344 - DNA, 19 bp, Artificial Sequence
  primer
agagtggtcaatgccctcg

SEQ ID NO: 110345 - DNA, 38 bp, Artificial Sequence
  primer
gtaaaacgacggccagtgacatgcccaagaaccagaag

SEQ ID NO: 110346 - DNA, 21 bp, Artificial Sequence
  primer
aaacggttccctcactgactc

SEQ ID NO: 110347 - DNA, 38 bp, Artificial Sequence
  primer
gtaaaacgacggccagttagatggaaaggtgggtggtc

SEQ ID NO: 110348 - DNA, 20 bp, Artificial Sequence
  primer
atcctcctgcctaggccttc

SEQ ID NO: 110349 - DNA, 20 bp, Artificial Sequence
  primer
aagaggacagcaggccagac

SEQ ID NO: 110350 - DNA, 21 bp, Artificial Sequence
  primer
acagcacctgaaacactcagc

SEQ ID NO: 110351 - DNA, 21 bp, Artificial Sequence
  primer
atttatgccctttaggccagc

SEQ ID NO: 110352 - DNA, 21 bp, Artificial Sequence
  primer
gaaccaacaagaataaccggg

SEQ ID NO: 110353 - DNA, 21 bp, Artificial Sequence
  primer
atacctgcaggaggacagagg

SEQ ID NO: 110354 - DNA, 21 bp, Artificial Sequence
  primer
agtgttgcatctcccacagag

SEQ ID NO: 110355 - DNA, 21 bp, Artificial Sequence
  primer
gtgtgccaagtacctgctgtg

SEQ ID NO: 110356 - DNA, 36 bp, Artificial Sequence
  primer
gtaaaacgacggccagtccaggtctgcctccatctc

SEQ ID NO: 110357 - DNA, 21 bp, Artificial Sequence
  primer
gtcgtcagcgtataggtggtg

SEQ ID NO: 110358 - DNA, 37 bp, Artificial Sequence
  primer
gtaaaacgacggccagtgatgcccattctccacactc

SEQ ID NO: 110359 - DNA, 21 bp, Artificial Sequence
  primer
cagctcttccatctcactccc

SEQ ID NO: 110360 - DNA, 21 bp, Artificial Sequence
  primer
acagggtcaaggctaggagtg

SEQ ID NO: 110361 - DNA, 38 bp, Artificial Sequence
  primer
gtaaaacgacggccagttagggacactgcagggttagg

SEQ ID NO: 110362 - DNA, 19 bp, Artificial Sequence
  primer
agggtcagcaccacaggag

SEQ ID NO: 110363 - DNA, 22 bp, Artificial Sequence
  primer
tttactaagccctcctcttggg

SEQ ID NO: 110364 - DNA, 21 bp, Artificial Sequence
  primer
acagacaagatagcaccacgg

SEQ ID NO: 110365 - DNA, 20 bp, Artificial Sequence
  primer
ggtcaaacggattaacacgg

SEQ ID NO: 110366 - DNA, 21 bp, Artificial Sequence
  primer
cccagcgtacatgtaaatccc

SEQ ID NO: 110367 - DNA, 37 bp, Artificial Sequence
  primer
gtaaaacgacggccagtcctggaacctctctcccttc

SEQ ID NO: 110368 - DNA, 21 bp, Artificial Sequence
  primer
gtgtgactgatggagaccagg

SEQ ID NO: 110369 - DNA, 21 bp, Artificial Sequence
  primer
gtggcagtgtggatgagagtc

SEQ ID NO: 110370 - DNA, 21 bp, Artificial Sequence
  primer
attagaggtgatgggctgtcg

SEQ ID NO: 110371 - DNA, 21 bp, Artificial Sequence
  primer
tttgtagtccctcttggcagc

SEQ ID NO: 110372 - DNA, 38 bp, Artificial Sequence
  primer
gtaaaacgacggccagtccctagggtcaggaatctgtg

SEQ ID NO: 110373 - DNA, 21 bp, Artificial Sequence
  primer
tgggtcacacatttacaaggg

SEQ ID NO: 110374 - DNA, 38 bp, Artificial Sequence
  primer
gtaaaacgacggccagtatttgattgccttcatttccc

SEQ ID NO: 110375 - DNA, 22 bp, Artificial Sequence
  primer
ccctggaaataaaggtcatgtg

SEQ ID NO: 110376 - DNA, 38 bp, Artificial Sequence
  primer
gtaaaacgacggccagtgtcattgaactggcatcagcc

SEQ ID NO: 110377 - DNA, 21 bp, Artificial Sequence
  primer
atgagaagttctgggcatgtg

SEQ ID NO: 110378 - DNA, 38 bp, Artificial Sequence
  primer
gtaaaacgacggccagtctttgcaactctccacccttc

SEQ ID NO: 110379 - DNA, 38 bp, Artificial Sequence
  primer
gtaaaacgacggccagttttccgaggaacgttaggaag

SEQ ID NO: 110380 - DNA, 21 bp, Artificial Sequence
  primer
agcaggcgtgtcatacctacc

SEQ ID NO: 110381 - DNA, 21 bp, Artificial Sequence
  primer
aatccagaggacaatgcaagg

SEQ ID NO: 110382 - DNA, 21 bp, Artificial Sequence
  primer
gctcactgaccttcccatctc

SEQ ID NO: 110383 - DNA, 38 bp, Artificial Sequence
  primer
gtaaaacgacggccagtactttaaggctcactgctccc

SEQ ID NO: 110384 - DNA, 38 bp, Artificial Sequence
  primer
gtaaaacgacggccagttgtctcaggtttgtctccacg

SEQ ID NO: 110385 - DNA, 37 bp, Artificial Sequence
  primer
gtaaaacgacggccagtaggcaggacttgccattctc

SEQ ID NO: 110386 - DNA, 38 bp, Artificial Sequence
  primer
gtaaaacgacggccagtgtccagatggagtggcatagg

SEQ ID NO: 110387 - DNA, 21 bp, Artificial Sequence
  primer
aaagtcagagcttggcgtgag

SEQ ID NO: 110388 - DNA, 38 bp, Artificial Sequence
  primer
gtaaaacgacggccagtaagctccagaccctgatgtgt

SEQ ID NO: 110389 - DNA, 21 bp, Artificial Sequence
  primer
tatctccaggccctcactctg

SEQ ID NO: 110390 - DNA, 37 bp, Artificial Sequence
  primer
gtaaaacgacggccagtggaagaatcgtcctccgaac

SEQ ID NO: 110391 - DNA, 22 bp, Artificial Sequence
  primer
cgcctaagcaaattaagtcacg

SEQ ID NO: 110392 - DNA, 44 bp, Artificial Sequence
  primer
gtaaaacgacggccagtaggtaaagtagcatttgtaagcctatg

SEQ ID NO: 110393 - DNA, 24 bp, Artificial Sequence
  primer
agctcttcataattagctggcaac

SEQ ID NO: 110394 - DNA, 38 bp, Artificial Sequence
  primer
gtaaaacgacggccagtcagggttccagatcccaatac

SEQ ID NO: 110395 - DNA, 37 bp, Artificial Sequence
  primer
gtaaaacgacggccagtagatggatcgtgtcagcacc

SEQ ID NO: 110396 - DNA, 35 bp, Artificial Sequence
  primer
gtaaaacgacggccagtgggaagctgcggtaggag

SEQ ID NO: 110397 - DNA, 42 bp, Artificial Sequence
  primer
gtaaaacgacggccagtctttaccctgactccattcatattc

SEQ ID NO: 110398 - DNA, 39 bp, Artificial Sequence
  primer
gtaaaacgacggccagttccaaatccaaactttctgtgg

SEQ ID NO: 110399 - DNA, 21 bp, Artificial Sequence
  primer
gttcaagtaaaggcagggagg

SEQ ID NO: 110400 - DNA, 38 bp, Artificial Sequence
  primer
gtaaaacgacggccagtggaaagagcaacaaagccatc

SEQ ID NO: 110401 - DNA, 27 bp, Artificial Sequence
  primer
ccagcaaggaaagtatatgtaactcac

SEQ ID NO: 110402 - DNA, 25 bp, Artificial Sequence
  primer
gcaaacaaacaggagttgtatatgg

SEQ ID NO: 110403 - DNA, 38 bp, Artificial Sequence
  primer
gtaaaacgacggccagtctctttacccatgaaggccag

SEQ ID NO: 110404 - DNA, 42 bp, Artificial Sequence
  primer
gtaaaacgacggccagtcccagattcctcatatcttgatttc

SEQ ID NO: 110405 - DNA, 38 bp, Artificial Sequence
  primer
gtaaaacgacggccagtatcactagccgcagaggtttc

SEQ ID NO: 110406 - DNA, 38 bp, Artificial Sequence
  primer
gtaaaacgacggccagtatcactaagagcccaaggctg

SEQ ID NO: 110407 - DNA, 38 bp, Artificial Sequence
  primer
gtaaaacgacggccagtcaggtcacctcacatccttca

SEQ ID NO: 110408 - DNA, 39 bp, Artificial Sequence
  primer
gtaaaacgacggccagtgcatgtgttctagattgcatca

SEQ ID NO: 110409 - DNA, 43 bp, Artificial Sequence
  primer
gtaaaacgacggccagttttgagtgtcaacaatgactaattcc

SEQ ID NO: 110410 - DNA, 37 bp, Artificial Sequence
  primer
gtaaaacgacggccagtctctgccaattcgatgtacg

SEQ ID NO: 110411 - DNA, 19 bp, Artificial Sequence
  primer
aattgccagacccatcctg

SEQ ID NO: 110412 - DNA, 25 bp, Artificial Sequence
  primer
ttggtggaaatgagtacaataaagc

SEQ ID NO: 110413 - DNA, 42 bp, Artificial Sequence
  primer
gtaaaacgacggccagtcattataaccaactacgactttccc

SEQ ID NO: 110414 - DNA, 39 bp, Artificial Sequence
  primer
gtaaaacgacggccagtgaaagtactgccttcccaaacc

SEQ ID NO: 110415 - DNA, 43 bp, Artificial Sequence
  primer
gtaaaacgacggccagtacgttactataaatactgctgcttgg

SEQ ID NO: 110416 - DNA, 37 bp, Artificial Sequence
  primer
gtaaaacgacggccagtctccactctgcaactcctcg

SEQ ID NO: 110417 - DNA, 38 bp, Artificial Sequence
  primer
gtaaaacgacggccagtacaaagggtgttgcatcttgg

SEQ ID NO: 110418 - DNA, 21 bp, Artificial Sequence
  primer
aagctcgcattctagccaatc

SEQ ID NO: 110419 - DNA, 21 bp, Artificial Sequence
  primer
gatgaagtctctgctgcctcc

SEQ ID NO: 110420 - DNA, 21 bp, Artificial Sequence
  primer
tctgggtttagagcccaaatg

SEQ ID NO: 110421 - DNA, 23 bp, Artificial Sequence
  primer
tgctttgcataaccaataactca

SEQ ID NO: 110422 - DNA, 38 bp, Artificial Sequence
  primer
gtaaaacgacggccagtacacgaaagatccctcaccac

SEQ ID NO: 110423 - DNA, 25 bp, Artificial Sequence
  primer
aaacccaagtgtttgagtctatcag

SEQ ID NO: 110424 - DNA, 23 bp, Artificial Sequence
  primer
tttcttcgtttatctgcagttgg

SEQ ID NO: 110425 - DNA, 20 bp, Artificial Sequence
  primer
acgttgataatggcagaggc

SEQ ID NO: 110426 - DNA, 39 bp, Artificial Sequence
  primer
gtaaaacgacggccagttctgaagcataaacatgcaacc

SEQ ID NO: 110427 - DNA, 38 bp, Artificial Sequence
  primer
gtaaaacgacggccagtacttcaggaagttgaggtggg

SEQ ID NO: 110428 - DNA, 20 bp, Artificial Sequence
  primer
gtctgtgctctgtcccttcg

SEQ ID NO: 110429 - DNA, 21 bp, Artificial Sequence
  primer
gaccctccactgggagtaaac

SEQ ID NO: 110430 - DNA, 39 bp, Artificial Sequence
  primer
gtaaaacgacggccagtgaaaggaggaagagttcattgc

SEQ ID NO: 110431 - DNA, 21 bp, Artificial Sequence
  primer
taacagtgaaaggaatggccc

SEQ ID NO: 110432 - DNA, 44 bp, Artificial Sequence
  primer
gtaaaacgacggccagtcattctcagaaacgagtcaatatacag

SEQ ID NO: 110433 - DNA, 21 bp, Artificial Sequence
  primer
cgtcctgcaccagaggaatac

SEQ ID NO: 110434 - DNA, 22 bp, Artificial Sequence
  primer
gcaggatttccaggaatctaag

SEQ ID NO: 110435 - DNA, 38 bp, Artificial Sequence
  primer
gtaaaacgacggccagttatccagaaatgtgccctttg

SEQ ID NO: 110436 - DNA, 40 bp, Artificial Sequence
  primer
gtaaaacgacggccagtaaatctctggataggcaaacagg

SEQ ID NO: 110437 - DNA, 18 bp, Artificial Sequence
  primer
acagcggcagcaccatag

SEQ ID NO: 110438 - DNA, 21 bp, Artificial Sequence
  primer
agcacatagccagtgagggtc

SEQ ID NO: 110439 - DNA, 38 bp, Artificial Sequence
  primer
gtaaaacgacggccagtctccttgtgtataaggcgcag

SEQ ID NO: 110440 - DNA, 38 bp, Artificial Sequence
  primer
gtaaaacgacggccagtctttgtggagaggagggtgag

SEQ ID NO: 110441 - DNA, 38 bp, Artificial Sequence
  primer
gtaaaacgacggccagttctgcagcaaaggagaaagaa

SEQ ID NO: 110442 - DNA, 21 bp, Artificial Sequence
  primer
ggaccagacactgacccagag

SEQ ID NO: 110443 - DNA, 38 bp, Artificial Sequence
  primer
gtaaaacgacggccagtttaaggtgccatcaacctgac

SEQ ID NO: 110444 - DNA, 21 bp, Artificial Sequence
  primer
gactcgtgcaccctctatcaa

SEQ ID NO: 110445 - DNA, 21 bp, Artificial Sequence
  primer
aaatcctttcccagagagcag

SEQ ID NO: 110446 - DNA, 22 bp, Artificial Sequence
  primer
gagaactgaggtgtcctgatgg

SEQ ID NO: 110447 - DNA, 38 bp, Artificial Sequence
  primer
gtaaaacgacggccagtgtcgttgatggtcttcagctc

SEQ ID NO: 110448 - DNA, 21 bp, Artificial Sequence
  primer
acggagtgagagagcaaggac

SEQ ID NO: 110449 - DNA, 37 bp, Artificial Sequence
  primer
gtaaaacgacggccagtcaccaaggagagtggagacg

SEQ ID NO: 110450 - DNA, 37 bp, Artificial Sequence
  primer
gtaaaacgacggccagtgctgcaagagctgcacagag

SEQ ID NO: 110451 - DNA, 38 bp, Artificial Sequence
  primer
gtaaaacgacggccagtttcctcctaacccaggaagtt

SEQ ID NO: 110452 - DNA, 21 bp, Artificial Sequence
  primer
tacagaatggagcagcagagg

SEQ ID NO: 110453 - DNA, 38 bp, Artificial Sequence
  primer
gtaaaacgacggccagtcctggtcgcagtatgaggtat

SEQ ID NO: 110454 - DNA, 38 bp, Artificial Sequence
  primer
gtaaaacgacggccagtcattctgtgtggctctaagcg

SEQ ID NO: 110455 - DNA, 21 bp, Artificial Sequence
  primer
aggagacgagcagaaccacta

SEQ ID NO: 110456 - DNA, 38 bp, Artificial Sequence
  primer
gtaaaacgacggccagtggctctaatggcagcagagag

SEQ ID NO: 110457 - DNA, 38 bp, Artificial Sequence
  primer
gtaaaacgacggccagttcacagggaagatcaagaggg

SEQ ID NO: 110458 - DNA, 38 bp, Artificial Sequence
  primer
gtaaaacgacggccagtatataggaaacagggcaggca

SEQ ID NO: 110459 - DNA, 38 bp, Artificial Sequence
  primer
gtaaaacgacggccagtgtgaaactgggcagacagaag

SEQ ID NO: 110460 - DNA, 21 bp, Artificial Sequence
  primer
catgcaggatggaaagaaaga

SEQ ID NO: 110461 - DNA, 21 bp, Artificial Sequence
  primer
tcagctctgggaacatcaaac

SEQ ID NO: 110462 - DNA, 38 bp, Artificial Sequence; identical to SEQ ID NO: 110440
  primer

SEQ ID NO: 110463 - DNA, 35 bp, Artificial Sequence
  primer
gtaaaacgacggccagtgagagcaaggctcccagg

SEQ ID NO: 110464 - DNA, 21 bp, Artificial Sequence
  primer
aaacggcaacagtagcgtatg

SEQ ID NO: 110465 - DNA, 43 bp, Artificial Sequence
  primer
gtaaaacgacggccagtggctcaaagagtttaacctactaccc

SEQ ID NO: 110466 - DNA, 43 bp, Artificial Sequence
  primer
gtaaaacgacggccagttctacgaagaactgagaacgtatgac

SEQ ID NO: 110467 - DNA, 38 bp, Artificial Sequence
  primer
gtaaaacgacggccagtcatttccacctatggagggtg

SEQ ID NO: 110468 - DNA, 38 bp, Artificial Sequence
  primer
gtaaaacgacggccagttttctccaatttcctccacag

SEQ ID NO: 110469 - DNA, 21 bp, Artificial Sequence
  primer
tgcactccacatcagtgtctg

SEQ ID NO: 110470 - DNA, 41 bp, Artificial Sequence
  primer
gtaaaacgacggccagttggattatcagaaacctagcaatg

SEQ ID NO: 110471 - DNA, 38 bp, Artificial Sequence
  primer
gtaaaacgacggccagtgagcaaactgcatggataggc

SEQ ID NO: 110472 - DNA, 21 bp, Artificial Sequence
  primer
ggccctttacagaaagtttgc

SEQ ID NO: 110473 - DNA, 41 bp, Artificial Sequence
  primer
gtaaaacgacggccagtttgaagtctgaatttgaaatgacg

SEQ ID NO: 110474 - DNA, 39 bp, Artificial Sequence
  primer
gtaaaacgacggccagtaagcattaggcagtgtcctttg

SEQ ID NO: 110475 - DNA, 22 bp, Artificial Sequence
  primer
aagcattaggcagtgtcctttg

SEQ ID NO: 110476 - DNA, 38 bp, Artificial Sequence
  primer
gtaaaacgacggccagttgccagcaccatattcttgag

SEQ ID NO: 110477 - DNA, 37 bp, Artificial Sequence
  primer
gtaaaacgacggccagtgacaaatcacgatggttggg

SEQ ID NO: 110478 - DNA, 36 bp, Artificial Sequence
  primer
gtaaaacgacggccagtgtcacacagagcagctggg

SEQ ID NO: 110479 - DNA, 26 bp, Artificial Sequence
  primer
ccaggctaatctctaacatactggtg

SEQ ID NO: 110480 - DNA, 42 bp, Artificial Sequence
  primer
gtaaaacgacggccagtgaaagtcacaactgaaccttcaaac

SEQ ID NO: 110481 - DNA, 39 bp, Artificial Sequence
  primer
gtaaaacgacggccagtcacctttcgaacactttccttc

SEQ ID NO: 110482 - DNA, 22 bp, Artificial Sequence
  primer
caaaggtttgcatggctagttc

SEQ ID NO: 110483 - DNA, 40 bp, Artificial Sequence
  primer
gtaaaacgacggccagtcgatcagcttcatcaataaccag

SEQ ID NO: 110484 - DNA, 21 bp, Artificial Sequence
  primer
tggcacaactacctcacttgg

SEQ ID NO: 110485 - DNA, 21 bp, Artificial Sequence
  primer
ctgtcatgcctcacctacagc

SEQ ID NO: 110486 - DNA, 38 bp, Artificial Sequence
  primer
gtaaaacgacggccagtagagggcaatacctccaatcc

SEQ ID NO: 110487 - DNA, 20 bp, Artificial Sequence
  primer
agtttccgtcagggaactgg

SEQ ID NO: 110488 - DNA, 38 bp, Artificial Sequence
  primer
gtaaaacgacggccagtgccagactcgagactcctctg

SEQ ID NO: 110489 - DNA, 21 bp, Artificial Sequence
  primer
cttcaaaggacagtgattgcc

SEQ ID NO: 110490 - DNA, 21 bp, Artificial Sequence
  primer
cataccaatccactgcaaagc

SEQ ID NO: 110491 - DNA, 20 bp, Artificial Sequence
  primer
cagtgcttgcaacccaagtc

SEQ ID NO: 110492 - DNA, 38 bp, Artificial Sequence
  primer
gtaaaacgacggccagtccatccagcctctaatcaacc

SEQ ID NO: 110493 - DNA, 21 bp, Artificial Sequence
  primer
taccagtatctgccaatgccc

SEQ ID NO: 110494 - DNA, 23 bp, Artificial Sequence
  primer
cgcctattaaagtcaagccaaac

SEQ ID NO: 110495 - DNA, 18 bp, Artificial Sequence
  primer
cactcgaacccaggaggc

SEQ ID NO: 110496 - DNA, 39 bp, Artificial Sequence
  primer
gtaaaacgacggccagtttataggcataagccaccttgc

SEQ ID NO: 110497 - DNA, 37 bp, Artificial Sequence
  primer
gtaaaacgacggccagtcacccagcccatagcttgtc

SEQ ID NO: 110498 - DNA, 37 bp, Artificial Sequence
  primer
gtaaaacgacggccagtctcatgaggtgcatgtctgc

SEQ ID NO: 110499 - DNA, 38 bp, Artificial Sequence
  primer
gtaaaacgacggccagtagtacgagagccaagacccag

SEQ ID NO: 110500 - DNA, 38 bp, Artificial Sequence
  primer
gtaaaacgacggccagtcaaaccacttcgtttcttccc

SEQ ID NO: 110501 - DNA, 22 bp, Artificial Sequence
  primer
cctgtgtacaaggatttctggc

SEQ ID NO: 110502 - DNA, 21 bp, Artificial Sequence
  primer
tagggacagagcctctcttgg

SEQ ID NO: 110503 - DNA, 21 bp, Artificial Sequence
  primer
ctacttgtgccgttgtccttg

SEQ ID NO: 110504 - DNA, 19 bp, Artificial Sequence
  primer
ggcaagtgactgccctagc

SEQ ID NO: 110505 - DNA, 23 bp, Artificial Sequence
  primer
cactggcttgtaaacagctgaag

SEQ ID NO: 110506 - DNA, 39 bp, Artificial Sequence
  primer
gtaaaacgacggccagttcctggatcttgtagcttggag

SEQ ID NO: 110507 - DNA, 21 bp, Artificial Sequence
  primer
caacaggagcgaaactctgtc

SEQ ID NO: 110508 - DNA, 38 bp, Artificial Sequence
  primer
gtaaaacgacggccagtcccaaacagctccttctgttc

SEQ ID NO: 110509 - DNA, 21 bp, Artificial Sequence
  primer
agccacagcctaaggtgtcag

SEQ ID NO: 110510 - DNA, 21 bp, Artificial Sequence
  primer
gttgaatacggtcatcgcatc

SEQ ID NO: 110511 - DNA, 38 bp, Artificial Sequence; identical to SEQ ID NO: 110499
  primer

SEQ ID NO: 110512 - DNA, 38 bp, Artificial Sequence
  primer
gtaaaacgacggccagtaaagcacttcccttctttcca

SEQ ID NO: 110513 - DNA, 37 bp, Artificial Sequence
  primer
gtaaaacgacggccagtctgagaccatccgacttccc

SEQ ID NO: 110514 - DNA, 21 bp, Artificial Sequence
  primer
tagggacagagcctctcttgg

SEQ ID NO: 110515 - DNA, 21 bp, Artificial Sequence
  primer
ctacttctgccgttgtccttg

SEQ ID NO: 110516 - DNA, 19 bp, Artificial Sequence
  primer
gagggctcttcctgagctg

SEQ ID NO: 110517 - DNA, 39 bp, Artificial Sequence
  primer
gtaaaacgacggccagtaaattcacttccagctctgagg

SEQ ID NO: 110518 - DNA, 42 bp, Artificial Sequence
  primer
gtaaaacgacggccagtttatcacagttatcaaagactccca

SEQ ID NO: 110519 - DNA, 39 bp, Artificial Sequence
  primer
gtaaaacgacggccagtgcaggcaaggaagaataaatcc

SEQ ID NO: 110520 - DNA, 21 bp, Artificial Sequence
  primer
aaactaggcaagggaaagctc

SEQ ID NO: 110521 - DNA, 39 bp, Artificial Sequence
  primer
gtaaaacgacggccagtcagccaaatgttgtgctctatg

SEQ ID NO: 110522 - DNA, 23 bp, Artificial Sequence
  primer
tttcacactctcaagacaactca

SEQ ID NO: 110523 - DNA, 27 bp, Artificial Sequence
  primer
tcctaatgactaatttcaaggacaaag

SEQ ID NO: 110524 - DNA, 21 bp, Artificial Sequence
  primer
tattcaaagcccacctgtcac

SEQ ID NO: 110525 - DNA, 38 bp, Artificial Sequence
  primer
gtaaaacgacggccagtgggaacagtacccagcacatc

SEQ ID NO: 110526 - DNA, 22 bp, Artificial Sequence
  primer
ttctagaggaagccatgtggtc

SEQ ID NO: 110527 - DNA, 20 bp, Artificial Sequence
  primer
ggcctgtgtagtgcctgatg

SEQ ID NO: 110528 - DNA, 21 bp, Artificial Sequence
  primer
tcatcttcctgggcttcagtc

SEQ ID NO: 110529 - DNA, 38 bp, Artificial Sequence
  primer
gtaaaacgacggccagttgtgtcccagtggaaagactc

SEQ ID NO: 110530 - DNA, 21 bp, Artificial Sequence
  primer
agctcagaggaagaggtcagc

SEQ ID NO: 110531 - DNA, 39 bp, Artificial Sequence
  primer
gtaaaacgacggccagttgaagtgcaaatgtacctgctc

SEQ ID NO: 110532 - DNA, 37 bp, Artificial Sequence
  primer
gtaaaacgacggccagtaacccacaaggtgctgacac

SEQ ID NO: 110533 - DNA, 21 bp, Artificial Sequence
  primer
ctcaaactcctggcctcaatc

SEQ ID NO: 110534 - DNA, 24 bp, Artificial Sequence
  primer
tccacagtaaatagaatgggtgac

SEQ ID NO: 110535 - DNA, 21 bp, Artificial Sequence
  primer
ttgcctatcatcaagcaggac

SEQ ID NO: 110536 - DNA, 38 bp, Artificial Sequence
  primer
gtaaaacgacggccagtgtcacttgaacccaggagaca

SEQ ID NO: 110537 - DNA, 18 bp, Artificial Sequence
  primer
gtgaacggagattgcgcc

SEQ ID NO: 110538 - DNA, 23 bp, Artificial Sequence
  primer
gggtaacagaatgagactctgcc

SEQ ID NO: 110539 - DNA, 21 bp, Artificial Sequence
  primer
aaatcacccttagcatcccag

SEQ ID NO: 110540 - DNA, 38 bp, Artificial Sequence
  primer
gtaaaacgacggccagtagctttcagtcattgccacac

SEQ ID NO: 110541 - DNA, 21 bp, Artificial Sequence
  primer
aggactgcttgagaccaggag

SEQ ID NO: 110542 - DNA, 39 bp, Artificial Sequence
  primer
gtaaaacgacggccagttgggaagcttaaatgaaaccct

SEQ ID NO: 110543 - DNA, 38 bp, Artificial Sequence
  primer
gtaaaacgacggccagtaacaggaagaacccacaccac

SEQ ID NO: 110544 - DNA, 42 bp, Artificial Sequence
  primer
gtaaaacgacggccagtgaaccagaactattgtttcccaatc

SEQ ID NO: 110545 - DNA, 38 bp, Artificial Sequence
  primer
gtaaaacgacggccagtctgaaagagacagggacttgg

SEQ ID NO: 110546 - DNA, 42 bp, Artificial Sequence
  primer
gtaaaacgacggccagtaaagtagatgcctaatactggaggc

SEQ ID NO: 110547 - DNA, 20 bp, Artificial Sequence
  primer
tcctgacttcgtgatccacc

SEQ ID NO: 110548 - DNA, 21 bp, Artificial Sequence
  primer
agcctcagcttcttcctcagc

SEQ ID NO: 110549 - DNA, 38 bp, Artificial Sequence
  primer
gtaaaacgacggccagtacactccgctctcagacttcc

SEQ ID NO: 110550 - DNA, 23 bp, Artificial Sequence
  primer
tttccaaactccagagtgaacag

SEQ ID NO: 110551 - DNA, 21 bp, Artificial Sequence
  primer
acccagggacagaacacaaag

SEQ ID NO: 110552 - DNA, 38 bp, Artificial Sequence
  primer
gtaaaacgacggccagtacagggtctttcttccaccag

SEQ ID NO: 110553 - DNA, 38 bp, Artificial Sequence
  primer
gtaaaacgacggccagtagaatcagtgccctccaactc

SEQ ID NO: 110554 - DNA, 21 bp, Artificial Sequence
  primer
cagcgatggctccaaatagtc

SEQ ID NO: 110555 - DNA, 23 bp, Artificial Sequence
  primer
tgccagcaacatatacttcttcg

SEQ ID NO: 110556 - DNA, 22 bp, Artificial Sequence
  primer
aaaccctggtgcataagttctc

SEQ ID NO: 110557 - DNA, 20 bp, Artificial Sequence
  primer
acaggtgtgcaccaccaatg

SEQ ID NO: 110558 - DNA, 21 bp, Artificial Sequence
  primer
ttaatgcccatgacattctgc

SEQ ID NO: 110559 - DNA, 21 bp, Artificial Sequence
  primer
tattccctcaaaccacccttc

SEQ ID NO: 110560 - DNA, 38 bp, Artificial Sequence
  primer
gtaaaacgacggccagtccagacttggaactgagggag

SEQ ID NO: 110561 - DNA, 21 bp, Artificial Sequence
  primer
aagagggatgtgagggttctg

SEQ ID NO: 110562 - DNA, 38 bp, Artificial Sequence
  primer
gtaaaacgacggccagtcggatcatcacaaaccatgtc

SEQ ID NO: 110563 - DNA, 38 bp, Artificial Sequence
  primer
gtaaaacgacggccagtgctatgggctcaatccagaag

SEQ ID NO: 110564 - DNA, 39 bp, Artificial Sequence
  primer
gtaaaacgacggccagttctccatttggttgataatggg

SEQ ID NO: 110565 - DNA, 21 bp, Artificial Sequence
  primer
tgtttgggaacaggtttctcc

SEQ ID NO: 110566 - DNA, 38 bp, Artificial Sequence
  primer
gtaaaacgacggccagtaggagccacagctcattcatc

SEQ ID NO: 110567 - DNA, 21 bp, Artificial Sequence
  primer
ccagggtctggatgataccac

SEQ ID NO: 110568 - DNA, 20 bp, Artificial Sequence
  primer
ctctgttagcgtctccaccg

SEQ ID NO: 110569 - DNA, 21 bp, Artificial Sequence
  primer
gtaaccttgccaaatgctgtg

SEQ ID NO: 110570 - DNA, 38 bp, Artificial Sequence
  primer
gtaaaacgacggccagtgagccttggaaccaacaattc

SEQ ID NO: 110571 - DNA, 21 bp, Artificial Sequence
  primer
aagggttatgctgccagagtc

SEQ ID NO: 110572 - DNA, 38 bp, Artificial Sequence
  primer
gtaaaacgacggccagtgaaacaaagactgaccgaggg

SEQ ID NO: 110573 - DNA, 21 bp, Artificial Sequence
  primer
agtgaaacacaagggtgggag

SEQ ID NO: 110574 - DNA, 38 bp, Artificial Sequence
  primer
gtaaaacgacggccagttctgtgctatgaggttctggg

SEQ ID NO: 110575 - DNA, 21 bp, Artificial Sequence
  primer
atcactgtcccatgctgctac

SEQ ID NO: 110576 - DNA, 38 bp, Artificial Sequence
  primer
gtaaaacgacggccagtcaggatgtggaaatgatgtgg

SEQ ID NO: 110577 - DNA, 22 bp, Artificial Sequence
  primer
tttagaggtgaaggtggtgagg

SEQ ID NO: 110578 - DNA, 39 bp, Artificial Sequence
  primer
gtaaaacgacggccagttggctctagggcacttattgtc

SEQ ID NO: 110579 - DNA, 20 bp, Artificial Sequence
  primer
tttgtcgaaactcgcgaaac

SEQ ID NO: 110580 - DNA, 20 bp, Artificial Sequence
  primer
actccagctctccagcacac

SEQ ID NO: 110581 - DNA, 21 bp, Artificial Sequence
  primer
caagcttcacatcaatttggc

SEQ ID NO: 110582 - DNA, 18 bp, Artificial Sequence
  primer
agctcccgcagtcaggtc

SEQ ID NO: 110583 - DNA, 21 bp, Artificial Sequence
  primer
gcataatgaagggtgaatggg

SEQ ID NO: 110584 - DNA, 41 bp, Artificial Sequence
  primer
gtaaaacgacggccagtaggtctttactgaactttcaaggg

SEQ ID NO: 110585 - DNA, 38 bp, Artificial Sequence
  primer
gtaaaacgacggccagtctgctacaaacaaagatgggc

SEQ ID NO: 110586 - DNA, 25 bp, Artificial Sequence
  primer
tcatgtccaatagtaacccacattc

SEQ ID NO: 110587 - DNA, 38 bp, Artificial Sequence
  primer
gtaaaacgacggccagttggccttgcctatcttaaggc

SEQ ID NO: 110588 - DNA, 41 bp, Artificial Sequence
  primer
gtaaaacgacggccagtgcactttgaacatctgtctaatcc

SEQ ID NO: 110589 - DNA, 22 bp, Artificial Sequence
  primer
tgcactattgctcacgtacacc

SEQ ID NO: 110590 - DNA, 24 bp, Artificial Sequence
  primer
cattgatttccagaagacaagaaa

SEQ ID NO: 110591 - DNA, 37 bp, Artificial Sequence
  primer
gtaaaacgacggccagtggcacaatcttggctcattg

SEQ ID NO: 110592 - DNA, 24 bp, Artificial Sequence
  primer
caccatggatgtgagacagaatta

SEQ ID NO: 110593 - DNA, 44 bp, Artificial Sequence
  primer
gtaaaacgacggccagtaaagtctggataaactgaatgtcagag

SEQ ID NO: 110594 - DNA, 24 bp, Artificial Sequence
  primer
tctttgaaatttacatcaccatgc

SEQ ID NO: 110595 - DNA, 39 bp, Artificial Sequence
  primer
gtaaaacgacggccagtccagtgtcaattccaatgaagg

SEQ ID NO: 110596 - DNA, 23 bp, Artificial Sequence
  primer
ggatagtgataatgctcctttcg

SEQ ID NO: 110597 - DNA, 22 bp, Artificial Sequence
  primer
tccagtaaactggctggagaag

SEQ ID NO: 110598 - DNA, 37 bp, Artificial Sequence
  primer
gtaaaacgacggccagtcttcctggctttcggatctc

SEQ ID NO: 110599 - DNA, 40 bp, Artificial Sequence
  primer
gtaaaacgacggccagttgcctaccaccatacctagtacc

SEQ ID NO: 110600 - DNA, 22 bp, Artificial Sequence
  primer
tcctgaagaatgtatgtgtggc

SEQ ID NO: 110601 - DNA, 38 bp, Artificial Sequence
  primer
gtaaaacgacggccagtagccaacaatgcatgtcagaa

SEQ ID NO: 110602 - DNA, 21 bp, Artificial Sequence
  primer
ggagggcgatacaaacgttac

SEQ ID NO: 110603 - DNA, 35 bp, Artificial Sequence
  primer
gtaaaacgacggccagtgacgcaggaccgccttag

SEQ ID NO: 110604 - DNA, 39 bp, Artificial Sequence
  primer
gtaaaacgacggccagttctcagccgtttattcacatca

SEQ ID NO: 110605 - DNA, 21 bp, Artificial Sequence
  primer
ttaactggaaatgcctcccac

SEQ ID NO: 110606 - DNA, 26 bp, Artificial Sequence
  primer
tgatgaccttaagcaacagagttaaa

SEQ ID NO: 110607 - DNA, 24 bp, Artificial Sequence
  primer
cacgtggatagtgaagactgtgtc

SEQ ID NO: 110608 - DNA, 36 bp, Artificial Sequence
  primer
gtaaaacgacggccagttgtggcatggcataaaggc

SEQ ID NO: 110609 - DNA, 40 bp, Artificial Sequence
  primer
gtaaaacgacggccagttgacagcattcatgagaaacatc

SEQ ID NO: 110610 - DNA, 21 bp, Artificial Sequence
  primer
gttgcaacctgaagaacaagc

SEQ ID NO: 110611 - DNA, 44 bp, Artificial Sequence
  primer
gtaaaacgacggccagtactcttacacatgatttgagaagacag

SEQ ID NO: 110612 - DNA, 20 bp, Artificial Sequence
  primer
ggacagggacctgaggaatc

SEQ ID NO: 110613 - DNA, 21 bp, Artificial Sequence
  primer
gctaggccctgaaactcacag

SEQ ID NO: 110614 - DNA, 39 bp, Artificial Sequence
  primer
gtaaaacgacggccagtttcacagcaaacacacagaaga

SEQ ID NO: 110615 - DNA, 39 bp, Artificial Sequence
  primer
gtaaaacgacggccagtaaactgtgcagaagagtggagg

SEQ ID NO: 110616 - DNA, 21 bp, Artificial Sequence
  primer
tcctcctgcttcctacaccag

SEQ ID NO: 110617 - DNA, 38 bp, Artificial Sequence
  primer
gtaaaacgacggccagtttgatgccaggaatttgagac

SEQ ID NO: 110618 - DNA, 38 bp, Artificial Sequence
  primer
gtaaaacgacggccagtccagcctttggtaagtcaacc

SEQ ID NO: 110619 - DNA, 18 bp, Artificial Sequence
  primer
aacaccaacagatggcgg

SEQ ID NO: 110620 - DNA, 38 bp, Artificial Sequence
  primer
gtaaaacgacggccagtcaaagaataacgcagtgtggc

SEQ ID NO: 110621 - DNA, 38 bp, Artificial Sequence
  primer
gtaaaacgacggccagtagctctctgcaaggtggtagg

SEQ ID NO: 110622 - DNA, 38 bp, Artificial Sequence
  primer
gtaaaacgacggccagtattagtgcagtgcagcctctg

SEQ ID NO: 110623 - DNA, 22 bp, Artificial Sequence
  primer
aatgctcagggtcctcttcttc

SEQ ID NO: 110624 - DNA, 21 bp, Artificial Sequence
  primer
acccggtggacataatgtttg

SEQ ID NO: 110625 - DNA, 38 bp, Artificial Sequence
  primer
gtaaaacgacggccagtgcaaagtacctgctctcagcc

SEQ ID NO: 110626 - DNA, 21 bp, Artificial Sequence
  primer
ggagaaacatttcagaagggc

SEQ ID NO: 110627 - DNA, 19 bp, Artificial Sequence
  primer
atactggtccttggtgccg

SEQ ID NO: 110628 - DNA, 38 bp, Artificial Sequence
  primer
gtaaaacgacggccagtgtgagtgtggaacacaccagg

SEQ ID NO: 110629 - DNA, 38 bp, Artificial Sequence
  primer
gtaaaacgacggccagttagaccgtggagggatagctg

SEQ ID NO: 110630 - DNA, 20 bp, Artificial Sequence
  primer
gctaagatgcaccactgcac

SEQ ID NO: 110631 - DNA, 38 bp, Artificial Sequence
  primer
gtaaaacgacggccagtccagaatgaggatggagaagc

SEQ ID NO: 110632 - DNA, 21 bp, Artificial Sequence
  primer
agacagaccagccaggatgac

SEQ ID NO: 110633 - DNA, 21 bp, Artificial Sequence
  primer
gtcgactcttccagccttgag

SEQ ID NO: 110634 - DNA, 38 bp, Artificial Sequence
  primer
gtaaaacgacggccagtgtgctagactgcacggttgtg

SEQ ID NO: 110635 - DNA, 21 bp, Artificial Sequence
  primer
acatctgctgaaggctgtctg

SEQ ID NO: 110636 - DNA, 21 bp, Artificial Sequence
  primer
ctgtcacgatgcttgaggatg

SEQ ID NO: 110637 - DNA, 38 bp, Artificial Sequence
  primer
gtaaaacgacggccagtgctcaatcttctgaaccaggc

SEQ ID NO: 110638 - DNA, 38 bp, Artificial Sequence
  primer
gtaaaacgacggccagtctcccactgacaagtgtggtc

SEQ ID NO: 110639 - DNA, 20 bp, Artificial Sequence
  primer
ggtcagaactcacccgactc

SEQ ID NO: 110640 - DNA, 35 bp, Artificial Sequence
  primer
gtaaaacgacggccagtaacccgactccaaggcac

SEQ ID NO: 110641 - DNA, 21 bp, Artificial Sequence
  primer
atgaacaagaacccaggcatc

SEQ ID NO: 110642 - DNA, 23 bp, Artificial Sequence
  primer
aacctaagcacccttgaactgtc

SEQ ID NO: 110643 - DNA, 21 bp, Artificial Sequence
  primer
cgataacctggcactgtgttc

SEQ ID NO: 110644 - DNA, 38 bp, Artificial Sequence
  primer
gtaaaacgacggccagtcgtggtaccatcaactgtccc

SEQ ID NO: 110645 - DNA, 38 bp, Artificial Sequence
  primer
gtaaaacgacggccagtagtatcatgcctgacacacgg

SEQ ID NO: 110646 - DNA, 38 bp, Artificial Sequence
  primer
gtaaaacgacggccagtaaatggaactggtgtgcagtg

SEQ ID NO: 110647 - DNA, 38 bp, Artificial Sequence
  primer
gtaaaacgacggccagtcaggactttatgcaccaggag

SEQ ID NO: 110648 - DNA, 22 bp, Artificial Sequence
  primer
ggacccagccttactgaatagg

SEQ ID NO: 110649 - DNA, 39 bp, Artificial Sequence
  primer
gtaaaacgacggccagtggctacagaagttgcaacaagg

SEQ ID NO: 110650 - DNA, 38 bp, Artificial Sequence
  primer
gtaaaacgacggccagttaaggacagctctctccctgc

SEQ ID NO: 110651 - DNA, 38 bp, Artificial Sequence
  primer
gtaaaacgacggccagtcattgctcccaatggcttaac

SEQ ID NO: 110652 - DNA, 21 bp, Artificial Sequence
  primer
ccattgctgagcctaaagacc

SEQ ID NO: 110653 - DNA, 38 bp, Artificial Sequence
  primer
gtaaaacgacggccagtaagaaagaggtgcaaagaggc

SEQ ID NO: 110654 - DNA, 21 bp, Artificial Sequence
  primer
gggctgggttaaggaaagatg

SEQ ID NO: 110655 - DNA, 21 bp, Artificial Sequence
  primer
gtcagcttacaaggcccattc

SEQ ID NO: 110656 - DNA, 39 bp, Artificial Sequence
  primer
gtaaaacgacggccagttgcttgacagaggaagtaaccc

SEQ ID NO: 110657 - DNA, 39 bp, Artificial Sequence
  primer
gtaaaacgacggccagtttatggagattgaaggctttgg

SEQ ID NO: 110658 - DNA, 21 bp, Artificial Sequence
  primer
tgagaagagagttgcggtgag

SEQ ID NO: 110659 - DNA, 22 bp, Artificial Sequence
  primer
cctcctctgacaagaactggac

SEQ ID NO: 110660 - DNA, 21 bp, Artificial Sequence
  primer
ctccatccagggacaatcaag

SEQ ID NO: 110661 - DNA, 35 bp, Artificial Sequence
  primer
gtaaaacgacggccagtctcacccacggcaaactg

SEQ ID NO: 110662 - DNA, 21 bp, Artificial Sequence
  primer
aaagcactgggctaacaggtg

SEQ ID NO: 110663 - DNA, 39 bp, Artificial Sequence
  primer
gtaaaacgacggccagtggagccatgcataattcatcag

SEQ ID NO: 110664 - DNA, 38 bp, Artificial Sequence
  primer
gtaaaacgacggccagtagaaacagcacatccctctgc

SEQ ID NO: 110665 - DNA, 37 bp, Artificial Sequence
  primer
gtaaaacgacggccagtcagtttgacaagaccgaggg

SEQ ID NO: 110666 - DNA, 36 bp, Artificial Sequence
  primer
gtaaaacgacggccagtagtcagggccacacagtcc

SEQ ID NO: 110667 - DNA, 38 bp, Artificial Sequence
  primer
gtaaaacgacggccagtgtgcaggagaaacaagtggag

SEQ ID NO: 110668 - DNA, 21 bp, Artificial Sequence
  primer
tcagggtcaggccacagatac

SEQ ID NO: 110669 - DNA, 21 bp, Artificial Sequence
  primer
ggctctgctcgactgtaagac

SEQ ID NO: 110670 - DNA, 21 bp, Artificial Sequence
  primer
tgcatacagaagatggccttg

SEQ ID NO: 110671 - DNA, 38 bp, Artificial Sequence
  primer
gtaaaacgacggccagtaaagtaagggtgccggttagc

SEQ ID NO: 110672 - DNA, 22 bp, Artificial Sequence
  primer
aaggcaacgatgctttagattg

SEQ ID NO: 110673 - DNA, 37 bp, Artificial Sequence
  primer
gtaaaacgacggccagtcgaatttcccactgcgtaac

SEQ ID NO: 110674 - DNA, 38 bp, Artificial Sequence
  primer
gtaaaacgacggccagtaacatccaaacaggtggtcag

SEQ ID NO: 110675 - DNA, 21 bp, Artificial Sequence
  primer
tgcctcaactggaatgtcatc

SEQ ID NO: 110676 - DNA, 22 bp, Artificial Sequence
  primer
cattggagaagactttgggttg

SEQ ID NO: 110677 - DNA, 20 bp, Artificial Sequence
  primer
agtccaatagcagcgcagag

SEQ ID NO: 110678 - DNA, 38 bp, Artificial Sequence
  primer
gtaaaacgacggccagtgagattgggtattgtttgcgg

SEQ ID NO: 110679 - DNA, 21 bp, Artificial Sequence
  primer
ataaaccacgcaaggacgaac

SEQ ID NO: 110680 - DNA, 36 bp, Artificial Sequence
  primer
gtaaaacgacggccagtacaagagcgcaactctgcc

SEQ ID NO: 110681 - DNA, 38 bp, Artificial Sequence
  primer
gtaaaacgacggccagtaagaaatcacgagccagcatc

SEQ ID NO: 110682 - DNA, 38 bp, Artificial Sequence
  primer
gtaaaacgacggccagtgcaggtcaaatactcccatgc

SEQ ID NO: 110683 - DNA, 38 bp, Artificial Sequence
  primer
gtaaaacgacggccagtagtcctcttgctgctacctgg

SEQ ID NO: 110684 - DNA, 27 bp, Artificial Sequence
  primer
ccacgtaatatttaaacaagtgctttg

SEQ ID NO: 110685 - DNA, 40 bp, Artificial Sequence
  primer
gtaaaacgacggccagtacagttaaccttggacgttatgc

SEQ ID NO: 110686 - DNA, 21 bp, Artificial Sequence
  primer
ccttcccttacgtaatttgcc

SEQ ID NO: 110687 - DNA, 21 bp, Artificial Sequence
  primer
caaaccaccttctgaacaggg

SEQ ID NO: 110688 - DNA, 42 bp, Artificial Sequence
  primer
gtaaaacgacggccagtcacatggagataaacactgacacag

SEQ ID NO: 110689 - DNA, 26 bp, Artificial Sequence
  primer
ccaaatcagaaggaactttcactaag

SEQ ID NO: 110690 - DNA, 23 bp, Artificial Sequence
  primer
gacttagctttgtaccaaatggc

SEQ ID NO: 110691 - DNA, 21 bp, Artificial Sequence
  primer
gtgcaaaggcactcacagaat

SEQ ID NO: 110692 - DNA, 21 bp, Artificial Sequence
  primer
attaaggcagatggcaacagg

SEQ ID NO: 110693 - DNA, 36 bp, Artificial Sequence
  primer
gtaaaacgacggccagtccatggcatgcaatttacc

SEQ ID NO: 110694 - DNA, 42 bp, Artificial Sequence
  primer
gtaaaacgacggccagtcctcataacaaccttctttgatacg

SEQ ID NO: 110695 - DNA, 27 bp, Artificial Sequence
  primer
cacagaataaataattcacattgcaca

SEQ ID NO: 110696 - DNA, 21 bp, Artificial Sequence
  primer
gagaggcaataacctggaggg

SEQ ID NO: 110697 - DNA, 21 bp, Artificial Sequence
  primer
tggaacttcccactgcttacc

SEQ ID NO: 110698 - DNA, 38 bp, Artificial Sequence
  primer
gtaaaacgacggccagttggaacttcccactgcttacc

SEQ ID NO: 110699 - DNA, 24 bp, Artificial Sequence
  primer
acgaaaggtgaaatctatgtgttg

SEQ ID NO: 110700 - DNA, 38 bp, Artificial Sequence
  primer
gtaaaacgacggccagttctatggacagcaacaccacc

SEQ ID NO: 110701 - DNA, 23 bp, Artificial Sequence
  primer
gccaccaagtccaacctattaac

SEQ ID NO: 110702 - DNA, 38 bp, Artificial Sequence
  primer
gtaaaacgacggccagtttcaaagaatgtgatggaggc

SEQ ID NO: 110703 - DNA, 26 bp, Artificial Sequence
  primer
aaataggatattcacagtgcttccac

SEQ ID NO: 110704 - DNA, 23 bp, Artificial Sequence
  primer
aacttaatggtggagaaacgacc

SEQ ID NO: 110705 - DNA, 23 bp, Artificial Sequence
  primer
tgagagaattctgaatcccaatc

SEQ ID NO: 110706 - DNA, 21 bp, Artificial Sequence
  primer
aggaacatcctgttgagcctt

SEQ ID NO: 110707 - DNA, 43 bp, Artificial Sequence
  primer
gtaaaacgacggccagtggcataaatctcaaagttaattcctg

SEQ ID NO: 110708 - DNA, 42 bp, Artificial Sequence
  primer
gtaaaacgacggccagtggacaggagctatgagaatgttaag

SEQ ID NO: 110709 - DNA, 21 bp, Artificial Sequence
  primer
atagggcacgtagtcctcgtc

SEQ ID NO: 110710 - DNA, 37 bp, Artificial Sequence
  primer
gtaaaacgacggccagtgagtccacaaggtcagcgtc

SEQ ID NO: 110711 - DNA, 21 bp, Artificial Sequence
  primer
tcttccttcagctgcttctcc

SEQ ID NO: 110712 - DNA, 21 bp, Artificial Sequence
  primer
agagagagacatggctcaggg

SEQ ID NO: 110713 - DNA, 38 bp, Artificial Sequence
  primer
gtaaaacgacggccagtacatgctcagaacataacggg

SEQ ID NO: 110714 - DNA, 21 bp, Artificial Sequence
  primer
cagtgggagccaggacataac

SEQ ID NO: 110715 - DNA, 38 bp, Artificial Sequence
  primer
gtaaaacgacggccagtgagggccaatttcaacagaag

SEQ ID NO: 110716 - DNA, 21 bp, Artificial Sequence
  primer
cggcagtagtactccaggatg

SEQ ID NO: 110717 - DNA, 21 bp, Artificial Sequence
  primer
tgtgaagatctgtggagtggc

SEQ ID NO: 110718 - DNA, 38 bp, Artificial Sequence
  primer
gtaaaacgacggccagtgcccacaaagtatgagcagtg

SEQ ID NO: 110719 - DNA, 38 bp, Artificial Sequence
  primer
gtaaaacgacggccagttccaatcagcttcagggagac

SEQ ID NO: 110720 - DNA, 21 bp, Artificial Sequence
  primer
aaagaccaactccagtcaggg

SEQ ID NO: 110721 - DNA, 21 bp, Artificial Sequence
  primer
tagtccgttcctcctggtctg

SEQ ID NO: 110722 - DNA, 21 bp, Artificial Sequence
  primer
ttgatgaaggtagtggcgatg

SEQ ID NO: 110723 - DNA, 38 bp, Artificial Sequence
  primer
gtaaaacgacggccagtatcagcactgactcatctggg

SEQ ID NO: 110724 - DNA, 21 bp, Artificial Sequence
  primer
acgtttctgacttccagcacc

SEQ ID NO: 110725 - DNA, 38 bp, Artificial Sequence
  primer
gtaaaacgacggccagtaaatgctgattctgtccaggg

SEQ ID NO: 110726 - DNA, 21 bp, Artificial Sequence
  primer
tctttgcctcaatttctgctg

SEQ ID NO: 110727 - DNA, 24 bp, Artificial Sequence
  primer
aaagtactacagggcaagtggaag

SEQ ID NO: 110728 - DNA, 21 bp, Artificial Sequence
  primer
tgcaaagactgttgccatctc

SEQ ID NO: 110729 - DNA, 22 bp, Artificial Sequence
  primer
gggaaagccatgtgaatctatg

SEQ ID NO: 110730 - DNA, 21 bp, Artificial Sequence
  primer
tcatggaatttgtggctcaac

SEQ ID NO: 110731 - DNA, 39 bp, Artificial Sequence
  primer
gtaaaacgacggccagttggcaaagacagttcagagacc

SEQ ID NO: 110732 - DNA, 27 bp, Artificial Sequence
  primer
aatatttgtcagccatttagtgacttc

SEQ ID NO: 110733 - DNA, 23 bp, Artificial Sequence
  primer
tcctggtcattctacctcacttg

SEQ ID NO: 110734 - DNA, 19 bp, Artificial Sequence
  primer
acagcctgccgttcatcag

SEQ ID NO: 110735 - DNA, 22 bp, Artificial Sequence
  primer
cactttgaaatttcctcaaccc

SEQ ID NO: 110736 - DNA, 23 bp, Artificial Sequence
  primer
cctcccttattatggttctcacc

SEQ ID NO: 110737 - DNA, 23 bp, Artificial Sequence
  primer
gccagtcttgttacgtctatccc

SEQ ID NO: 110738 - DNA, 21 bp, Artificial Sequence
  primer
caggccaacagtctttccatc

SEQ ID NO: 110739 - DNA, 21 bp, Artificial Sequence
  primer
cctagccacccaactttcttg

SEQ ID NO: 110740 - DNA, 38 bp, Artificial Sequence
  primer
gtaaaacgacggccagtcactgaggctttcctgggtag

SEQ ID NO: 110741 - DNA, 38 bp, Artificial Sequence
  primer
gtaaaacgacggccagtgcagcgtgaagaccctaaatc

SEQ ID NO: 110742 - DNA, 20 bp, Artificial Sequence
  primer
ctatgccgattgccagtctc

SEQ ID NO: 110743 - DNA, 22 bp, Artificial Sequence
  primer
gatttcacgctttagcacatcc

SEQ ID NO: 110744 - DNA, 21 bp, Artificial Sequence
  primer
agctccagctctccactaagg

SEQ ID NO: 110745 - DNA, 37 bp, Artificial Sequence
  primer
gtaaaacgacggccagttgattggaggtgaggcagtg

SEQ ID NO: 110746 - DNA, 37 bp, Artificial Sequence
  primer
gtaaaacgacggccagttgggagacagaatgaggctg

SEQ ID NO: 110747 - DNA, 38 bp, Artificial Sequence
  primer
gtaaaacgacggccagtttatggcagcctaatgctttg

SEQ ID NO: 110748 - DNA, 41 bp, Artificial Sequence
  primer
gtaaaacgacggccagtcataacctagggactaattgcagc

SEQ ID NO: 110749 - DNA, 39 bp, Artificial Sequence
  primer
gtaaaacgacggccagtaatatcatttcacatttgcccg

SEQ ID NO: 110750 - DNA, 38 bp, Artificial Sequence
  primer
gtaaaacgacggccagtgctaagacagttgctccctgg

SEQ ID NO: 110751 - DNA, 22 bp, Artificial Sequence
  primer
tgaagctaggcattacctttgg

SEQ ID NO: 110752 - DNA, 21 bp, Artificial Sequence
  primer
catgctgagccatttggattc

SEQ ID NO: 110753 - DNA, 35 bp, Artificial Sequence; identical to SEQ ID NO: 3581
  primer

SEQ ID NO: 110754 - DNA, 26 bp, Artificial Sequence
  primer
tttcacctaaagatttcaacacttcc

SEQ ID NO: 110755 - DNA, 20 bp, Artificial Sequence
  primer
tatgcaagtgtgatttgccc

SEQ ID NO: 110756 - DNA, 26 bp, Artificial Sequence
  primer
aagataaactcagcattcttaggtgc

SEQ ID NO: 110757 - DNA, 42 bp, Artificial Sequence
  primer
gtaaaacgacggccagttgtaggatacagaaggtgaggacag

SEQ ID NO: 110758 - DNA, 21 bp, Artificial Sequence
  primer
gggcaagaagtttgtgagagg

SEQ ID NO: 110759 - DNA, 38 bp, Artificial Sequence
  primer
gtaaaacgacggccagttatcactgccatgctaaagcc

SEQ ID NO: 110760 - DNA, 20 bp, Artificial Sequence
  primer
actgatggatgcttgggttg

SEQ ID NO: 110761 - DNA, 21 bp, Artificial Sequence
  primer
aaacacaaccattccctcagc

SEQ ID NO: 110762 - DNA, 36 bp, Artificial Sequence
  primer
gtaaaacgacggccagtcaattgggccaccaaactc

SEQ ID NO: 110763 - DNA, 20 bp, Artificial Sequence
  primer
tcatggtaggagccaaatgc

SEQ ID NO: 110764 - DNA, 37 bp, Artificial Sequence
  primer
gtaaaacgacggccagttgggcaacagagacagacag

SEQ ID NO: 110765 - DNA, 43 bp, Artificial Sequence
  primer
gtaaaacgacggccagtctgcaaatgtatttatcactgaattg

SEQ ID NO: 110766 - DNA, 39 bp, Artificial Sequence
  primer
gtaaaacgacggccagttcagtaggacaatgcaatggag

SEQ ID NO: 110767 - DNA, 38 bp, Artificial Sequence
  primer
gtaaaacgacggccagtcacacaaatgaaacgcacatc

SEQ ID NO: 110768 - DNA, 22 bp, Artificial Sequence
  primer
aacaccctccttcatgagacac

SEQ ID NO: 110769 - DNA, 20 bp, Artificial Sequence
  primer
ggagacactggtgtggaagg

SEQ ID NO: 110770 - DNA, 21 bp, Artificial Sequence
  primer
cccaaagtgccaaattgataa

SEQ ID NO: 110771 - DNA, 30 bp, Artificial Sequence
  primer
gcacacaatataacattaactagtcaccat

SEQ ID NO: 110772 - DNA, 21 bp, Artificial Sequence
  primer
aaccctttgttggtttcttgc

SEQ ID NO: 110773 - DNA, 24 bp, Artificial Sequence
  primer
cagtcttctgtattaccgtgcaac

SEQ ID NO: 110774 - DNA, 21 bp, Artificial Sequence
  primer
ccttgcctacctcacaaacag

SEQ ID NO: 110775 - DNA, 21 bp, Artificial Sequence
  primer
ggtcaaaccaaagtatgcctg

SEQ ID NO: 110776 - DNA, 24 bp, Artificial Sequence
  primer
gcctacaaagagcagctaggtatc

SEQ ID NO: 110777 - DNA, 23 bp, Artificial Sequence
  primer
tttcaaggtggtgtatgtcaatg

SEQ ID NO: 110778 - DNA, 24 bp, Artificial Sequence
  primer
ggtttccagtgattgtctatcttg

SEQ ID NO: 110779 - DNA, 44 bp, Artificial Sequence
  primer
gtaaaacgacggccagtatgtctaggacaacttgtttacttgtg

SEQ ID NO: 110780 - DNA, 27 bp, Artificial Sequence
  primer
acatacctgcatcataagttcatttag

SEQ ID NO: 110781 - DNA, 37 bp, Artificial Sequence
  primer
gtaaaacgacggccagtgacctcacatgctctttgcg

SEQ ID NO: 110782 - DNA, 21 bp, Artificial Sequence
  primer
gggtgacaatgcaagactcag

SEQ ID NO: 110783 - DNA, 43 bp, Artificial Sequence
  primer
gtaaaacgacggccagtggctggctttaaatatagtttgactg

SEQ ID NO: 110784 - DNA, 38 bp, Artificial Sequence
  primer
gtaaaacgacggccagtcactaaagtggcgaatagggc

SEQ ID NO: 110785 - DNA, 38 bp, Artificial Sequence
  primer
gtaaaacgacggccagttggcagagaacaaaccctttc

SEQ ID NO: 110786 - DNA, 24 bp, Artificial Sequence
  primer
tgctagcaatactttcctccattc

SEQ ID NO: 110787 - DNA, 22 bp, Artificial Sequence
  primer
ttgctaccaagaaaggttgagg

SEQ ID NO: 110788 - DNA, 38 bp, Artificial Sequence
  primer
gtaaaacgacggccagttgaaacaagtgggcaatgaac

SEQ ID NO: 110789 - DNA, 18 bp, Artificial Sequence
  primer
cctgaggtcttcccagcc

SEQ ID NO: 110790 - DNA, 21 bp, Artificial Sequence
  primer
tgccaatctgcattacagctc

SEQ ID NO: 110791 - DNA, 38 bp, Artificial Sequence
  primer
gtaaaacgacggccagtaattatggaaacaggcatcgg

SEQ ID NO: 110792 - DNA, 40 bp, Artificial Sequence
  primer
gtaaaacgacggccagtgaatgaactaaccaagggctttc

SEQ ID NO: 110793 - DNA, 38 bp, Artificial Sequence
  primer
gtaaaacgacggccagtgtgtcaggttctcagccagtg

SEQ ID NO: 110794 - DNA, 21 bp, Artificial Sequence
  primer
aggccaaaccttgattcaacc

SEQ ID NO: 110795 - DNA, 39 bp, Artificial Sequence
  primer
gtaaaacgacggccagtgatctctgttggagcaggtttc

SEQ ID NO: 110796 - DNA, 18 bp, Artificial Sequence
  primer
ctcgaccctgaccacgac

SEQ ID NO: 110797 - DNA, 38 bp, Artificial Sequence
  primer
gtaaaacgacggccagtaaccctgtggctaaagtcagg

SEQ ID NO: 110798 - DNA, 21 bp, Artificial Sequence
  primer
atgtgtcagcatcctcgtctg

SEQ ID NO: 110799 - DNA, 20 bp, Artificial Sequence
  primer
ctaccgagagcacacaagcc

SEQ ID NO: 110800 - DNA, 38 bp, Artificial Sequence
  primer
gtaaaacgacggccagtaccaaatcgaaagctgtcctg

SEQ ID NO: 110801 - DNA, 21 bp, Artificial Sequence
  primer
atagaggctggcctgagtcac

SEQ ID NO: 110802 - DNA, 38 bp, Artificial Sequence
  primer
gtaaaacgacggccagtcaggcaagaggatagcctgag

SEQ ID NO: 110803 - DNA, 21 bp, Artificial Sequence
  primer
ggacaaactggccctttactg

SEQ ID NO: 110804 - DNA, 21 bp, Artificial Sequence
  primer
gctttcagagcagaagcttgg

SEQ ID NO: 110805 - DNA, 21 bp, Artificial Sequence
  primer
acaaagttaatggccacaccc

SEQ ID NO: 110806 - DNA, 21 bp, Artificial Sequence
  primer
tggtgcacgtgtctgtaattc

SEQ ID NO: 110807 - DNA, 36 bp, Artificial Sequence
  primer
gtaaaacgacggccagtacggcaggccatttatgag

SEQ ID NO: 110808 - DNA, 38 bp, Artificial Sequence
  primer
gtaaaacgacggccagtggaataagcaaaggttgcgag

SEQ ID NO: 110809 - DNA, 37 bp, Artificial Sequence
  primer
gtaaaacgacggccagtagagagggaaaggtgcttgc

SEQ ID NO: 110810 - DNA, 37 bp, Artificial Sequence
  primer
gtaaaacgacggccagtgacagagcatgagaggcagg

SEQ ID NO: 110811 - DNA, 38 bp, Artificial Sequence
  primer
gtaaaacgacggccagttaaatggatgagatggtgccc

SEQ ID NO: 110812 - DNA, 20 bp, Artificial Sequence
  primer
gggatggacagatagaccgc

SEQ ID NO: 110813 - DNA, 21 bp, Artificial Sequence
  primer
tgtgtgtcccagaccaaagac

SEQ ID NO: 110814 - DNA, 21 bp, Artificial Sequence
  primer
gcctcttgagctgcgatattc

SEQ ID NO: 110815 - DNA, 37 bp, Artificial Sequence
  primer
gtaaaacgacggccagtcactcagcagggatgctagg

SEQ ID NO: 110816 - DNA, 21 bp, Artificial Sequence
  primer
ctaccacctgaatttgctggg

SEQ ID NO: 110817 - DNA, 21 bp, Artificial Sequence
  primer
cctgactgatgtggctttcag

SEQ ID NO: 110818 - DNA, 21 bp, Artificial Sequence
  primer
agtttctggtggagggaagtg

SEQ ID NO: 110819 - DNA, 19 bp, Artificial Sequence
  primer
ccaccttctccttgaagcg

SEQ ID NO: 110820 - DNA, 18 bp, Artificial Sequence
  primer
accagccagtggtttcgg

SEQ ID NO: 110821 - DNA, 22 bp, Artificial Sequence
  primer
ccgtcaaatctcttccaatcac

SEQ ID NO: 110822 - DNA, 39 bp, Artificial Sequence
  primer
gtaaaacgacggccagtaatcccaaagccacctatatcc

SEQ ID NO: 110823 - DNA, 21 bp, Artificial Sequence
  primer
ccatccctgagcttgaatagc

SEQ ID NO: 110824 - DNA, 22 bp, Artificial Sequence
  primer
gacaatggcaggaagcaaatac

SEQ ID NO: 110825 - DNA, 21 bp, Artificial Sequence
  primer
aacagctccagctgaataggg

SEQ ID NO: 110826 - DNA, 21 bp, Artificial Sequence
  primer
tctgcttcatcaaggacaagg

SEQ ID NO: 110827 - DNA, 38 bp, Artificial Sequence
  primer
gtaaaacgacggccagtccaagtcgcactccacattag

SEQ ID NO: 110828 - DNA, 22 bp, Artificial Sequence
  primer
caactcaccaaacaatgatccc

SEQ ID NO: 110829 - DNA, 38 bp, Artificial Sequence
  primer
gtaaaacgacggccagtctcagactccagtgcttgacc

SEQ ID NO: 110830 - DNA, 37 bp, Artificial Sequence
  primer
gtaaaacgacggccagtaagccatgaatgcgagtttg

SEQ ID NO: 110831 - DNA, 21 bp, Artificial Sequence
  primer
tctaatcgactggaagcagcc

SEQ ID NO: 110832 - DNA, 21 bp, Artificial Sequence
  primer
attcatggtaggcgtgaaatg

SEQ ID NO: 110833 - DNA, 38 bp, Artificial Sequence
  primer
gtaaaacgacggccagtttacttccaaagctcccattg

SEQ ID NO: 110834 - DNA, 21 bp, Artificial Sequence
  primer
ggaatatcctgttggcattgg

SEQ ID NO: 110835 - DNA, 43 bp, Artificial Sequence
  primer
gtaaaacgacggccagttgtttcaggaatgtagagaaatatcc

SEQ ID NO: 110836 - DNA, 36 bp, Artificial Sequence
  primer
gtaaaacgacggccagtaggccatcatcagggacag

SEQ ID NO: 110837 - DNA, 20 bp, Artificial Sequence
  primer
aggctcaggcttcacctgta

SEQ ID NO: 110838 - DNA, 38 bp, Artificial Sequence
  primer
gtaaaacgacggccagtggaacagatcaggaggtcagg

SEQ ID NO: 110839 - DNA, 38 bp, Artificial Sequence
  primer
gtaaaacgacggccagtttatgccacagcgctaacttt

SEQ ID NO: 110840 - DNA, 38 bp, Artificial Sequence
  primer
gtaaaacgacggccagttgagaagagagaaatgccacc

SEQ ID NO: 110841 - DNA, 41 bp, Artificial Sequence
  primer
gtaaaacgacggccagttttcaaggacagaacagataccaa

SEQ ID NO: 110842 - DNA, 40 bp, Artificial Sequence
  primer
gtaaaacgacggccagtaaggaagattaggcatgaagagg

SEQ ID NO: 110843 - DNA, 22 bp, Artificial Sequence
  primer
tcaaatctggtccacaaaggac

SEQ ID NO: 110844 - DNA, 21 bp, Artificial Sequence
  primer
ttgttgctccatgcttcaaat

SEQ ID NO: 110845 - DNA, 38 bp, Artificial Sequence
  primer
gtaaaacgacggccagtgatctccacaggcttcacagc

SEQ ID NO: 110846 - DNA, 18 bp, Artificial Sequence
  primer
ccgtgttagccaggatgg

SEQ ID NO: 110847 - DNA, 41 bp, Artificial Sequence
  primer
gtaaaacgacggccagtaaggagaccagtttctcatagagc

SEQ ID NO: 110848 - DNA, 40 bp, Artificial Sequence
  primer
gtaaaacgacggccagtcattattcatgccattaggcttc

SEQ ID NO: 110849 - DNA, 38 bp, Artificial Sequence
  primer
gtaaaacgacggccagtctccagcctgagagagactcc

SEQ ID NO: 110850 - DNA, 23 bp, Artificial Sequence
  primer
cttctttgcaaatagcagacaca

SEQ ID NO: 110851 - DNA, 35 bp, Artificial Sequence
  primer
gtaaaacgacggccagtttctgcgaggcagacacc

SEQ ID NO: 110852 - DNA, 20 bp, Artificial Sequence
  primer
gaccgccgcacttaagaatc

SEQ ID NO: 110853 - DNA, 21 bp, Artificial Sequence
  primer
gagtgctgagaccacacttgg

SEQ ID NO: 110854 - DNA, 37 bp, Artificial Sequence
  primer
gtaaaacgacggccagtgctccaggtctagggtccac

SEQ ID NO: 110855 - DNA, 38 bp, Artificial Sequence
  primer
gtaaaacgacggccagtaagtctgtcactggcctggag

SEQ ID NO: 110856 - DNA, 21 bp, Artificial Sequence
  primer
caggtggttaaagatggtggc

SEQ ID NO: 110857 - DNA, 37 bp, Artificial Sequence
  primer
gtaaaacgacggccagtcagcctcgtcgataatctgc

SEQ ID NO: 110858 - DNA, 21 bp, Artificial Sequence
  primer
ctctgggcattaaggaaggag

SEQ ID NO: 110859 - DNA, 21 bp, Artificial Sequence
  primer
gtagtggtgctacagggacgg

SEQ ID NO: 110860 - DNA, 20 bp, Artificial Sequence
  primer
gagaactcagccacgtccac

SEQ ID NO: 110861 - DNA, 38 bp, Artificial Sequence
  primer
gtaaaacgacggccagtccaatttgcagaaggaagcac

SEQ ID NO: 110862 - DNA, 38 bp, Artificial Sequence
  primer
gtaaaacgacggccagtggaacgacagcttctctccac

SEQ ID NO: 110863 - DNA, 21 bp, Artificial Sequence
  primer
accttgacagactcctccagc

SEQ ID NO: 110864 - DNA, 21 bp, Artificial Sequence
  primer
ctctgttgccttctcgctttc

SEQ ID NO: 110865 - DNA, 38 bp, Artificial Sequence
  primer
gtaaaacgacggccagtgtgacaagccctgaagtctcc

SEQ ID NO: 110866 - DNA, 21 bp, Artificial Sequence
  primer
gccaggcccaactaggtctac

SEQ ID NO: 110867 - DNA, 26 bp, Artificial Sequence
  primer
gacaaatgaccttattgtctgacttg

SEQ ID NO: 110868 - DNA, 21 bp, Artificial Sequence
  primer
cagcacaaatgcctactttgc

SEQ ID NO: 110869 - DNA, 24 bp, Artificial Sequence
  primer
ggtggaaagaaagagttcaagaag

SEQ ID NO: 110870 - DNA, 21 bp, Artificial Sequence
  primer
ggagtaagatccggagcactg

SEQ ID NO: 110871 - DNA, 21 bp, Artificial Sequence
  primer
caaattattgccaaatgtccc

SEQ ID NO: 110872 - DNA, 38 bp, Artificial Sequence
  primer
gtaaaacgacggccagtctgactgaaggtggcaaacag

SEQ ID NO: 110873 - DNA, 21 bp, Artificial Sequence
  primer
caggccaagaaacctatctcc

SEQ ID NO: 110874 - DNA, 25 bp, Artificial Sequence
  primer
tgcaggatgatcatatagttagcac

SEQ ID NO: 110875 - DNA, 38 bp, Artificial Sequence
  primer
gtaaaacgacggccagtggctgtacaaatcagaaccca

SEQ ID NO: 110876 - DNA, 21 bp, Artificial Sequence
  primer
tatgtgcagggaatagcaggg

SEQ ID NO: 110877 - DNA, 23 bp, Artificial Sequence
  primer
tccaaattctaataacggaaggg

SEQ ID NO: 110878 - DNA, 22 bp, Artificial Sequence
  primer
gaggatcacttgagcctaggag

SEQ ID NO: 110879 - DNA, 21 bp, Artificial Sequence
  primer
acatggcaagaccctcatctc

SEQ ID NO: 110880 - DNA, 21 bp, Artificial Sequence
  primer
atcccaatttgacaatggctc

SEQ ID NO: 110881 - DNA, 38 bp, Artificial Sequence
  primer
gtaaaacgacggccagtattggcgttggctttacaatc

SEQ ID NO: 110882 - DNA, 38 bp, Artificial Sequence
  primer
gtaaaacgacggccagttttgaacattcagcttccacg

SEQ ID NO: 110883 - DNA, 38 bp, Artificial Sequence
  primer
gtaaaacgacggccagttttgtaggtcattcagcctcc

SEQ ID NO: 110884 - DNA, 38 bp, Artificial Sequence
  primer
gtaaaacgacggccagtgtcgcttgacaagtcatcagc

SEQ ID NO: 110885 - DNA, 22 bp, Artificial Sequence
  primer
tcattaagatcaagacctcggg

SEQ ID NO: 110886 - DNA, 38 bp, Artificial Sequence
  primer
gtaaaacgacggccagtactccttgcgtctttgtccag

SEQ ID NO: 110887 - DNA, 44 bp, Artificial Sequence
  primer
gtaaaacgacggccagtgcatacacaatattgaaagtttagcag

SEQ ID NO: 110888 - DNA, 35 bp, Artificial Sequence
  primer
gtaaaacgacggccagtcgagacacgtgctcaggc

SEQ ID NO: 110889 - DNA, 37 bp, Artificial Sequence
  primer
gtaaaacgacggccagtgactggaggaccacatctgc

SEQ ID NO: 110890 - DNA, 38 bp, Artificial Sequence
  primer
gtaaaacgacggccagtaggagatgtgacaggtgggac

SEQ ID NO: 110891 - DNA, 21 bp, Artificial Sequence
  primer
gagatgacagcacactcgtgg

SEQ ID NO: 110892 - DNA, 40 bp, Artificial Sequence
  primer
gtaaaacgacggccagttcgaactaatgtcctggagacac

SEQ ID NO: 110893 - DNA, 38 bp, Artificial Sequence
  primer
gtaaaacgacggccagtattctggaagagggtgcacag

SEQ ID NO: 110894 - DNA, 21 bp, Artificial Sequence
  primer
cagagccttcctctggttgac

SEQ ID NO: 110895 - DNA, 20 bp, Artificial Sequence
  primer
cttggtatccacgtcaagcc

SEQ ID NO: 110896 - DNA, 20 bp, Artificial Sequence
  primer
gcacgaggaagaaggaggtc

SEQ ID NO: 110897 - DNA, 21 bp, Artificial Sequence
  primer
aaatgaccatcttgagcccag

SEQ ID NO: 110898 - DNA, 22 bp, Artificial Sequence
  primer
gagttaagccttgtaccctcgg

SEQ ID NO: 110899 - DNA, 20 bp, Artificial Sequence
  primer
gtcaaacccagccctacctc

SEQ ID NO: 110900 - DNA, 38 bp, Artificial Sequence
  primer
gtaaaacgacggccagtcgggagcggtagttctttatg

SEQ ID NO: 110901 - DNA, 21 bp, Artificial Sequence
  primer
ccaaggctgcaggttaagaag

SEQ ID NO: 110902 - DNA, 21 bp, Artificial Sequence
  primer
acctccatccactgctcaaag

SEQ ID NO: 110903 - DNA, 20 bp, Artificial Sequence
  primer
gcagagggagagtgggagac

SEQ ID NO: 110904 - DNA, 20 bp, Artificial Sequence
  primer
ctctctcactcaccctgggc

SEQ ID NO: 110905 - DNA, 21 bp, Artificial Sequence
  primer
agcaccaggtcccatctattg

SEQ ID NO: 110906 - DNA, 38 bp, Artificial Sequence
  primer
gtaaaacgacggccagttgcctcagcgttaccctaatc

SEQ ID NO: 110907 - DNA, 21 bp, Artificial Sequence
  primer
ttctgtggccatacagtgctc

SEQ ID NO: 110908 - DNA, 38 bp, Artificial Sequence
  primer
gtaaaacgacggccagttcagatctgtccgatcacctc

SEQ ID NO: 110909 - DNA, 39 bp, Artificial Sequence
  primer
gtaaaacgacggccagtctcagaagaatttccaggatgg

SEQ ID NO: 110910 - DNA, 21 bp, Artificial Sequence
  primer
tgaagtctcactgtgttgccc

SEQ ID NO: 110911 - DNA, 39 bp, Artificial Sequence
  primer
gtaaaacgacggccagttcacccttgttgcttaaacctc

SEQ ID NO: 110912 - DNA, 20 bp, Artificial Sequence
  primer
cagcaaagcacaatgggaag

SEQ ID NO: 110913 - DNA, 38 bp, Artificial Sequence
  primer
gtaaaacgacggccagtgtgacagcacaagaccctgtc

SEQ ID NO: 110914 - DNA, 39 bp, Artificial Sequence
  primer
gtaaaacgacggccagtgcatttcataggtgctacaggg

SEQ ID NO: 110915 - DNA, 21 bp, Artificial Sequence
  primer
aataaagccaaccttgttcgg

SEQ ID NO: 110916 - DNA, 38 bp, Artificial Sequence
  primer
gtaaaacgacggccagtaaagacaacacatgcggacag

SEQ ID NO: 110917 - DNA, 20 bp, Artificial Sequence
  primer
aagccctgtaggaatccacg

SEQ ID NO: 110918 - DNA, 20 bp, Artificial Sequence
  primer
ttcaattgctgaccacatgc

SEQ ID NO: 110919 - DNA, 38 bp, Artificial Sequence
  primer
gtaaaacgacggccagtcagccagtggccagtttattc

SEQ ID NO: 110920 - DNA, 25 bp, Artificial Sequence
  primer
cccacacaattcctatttaaagaac

SEQ ID NO: 110921 - DNA, 37 bp, Artificial Sequence
  primer
gtaaaacgacggccagtaaagcaaactggagccatcc

SEQ ID NO: 110922 - DNA, 21 bp, Artificial Sequence
  primer
agaccaggagtgcggtttaag

SEQ ID NO: 110923 - DNA, 21 bp, Artificial Sequence
  primer
aactccagcccagagtgtttg

SEQ ID NO: 110924 - DNA, 21 bp, Artificial Sequence
  primer
agctctggaggtggacaagac

SEQ ID NO: 110925 - DNA, 38 bp, Artificial Sequence
  primer
gtaaaacgacggccagtaatcagattccagctccaagg

SEQ ID NO: 110926 - DNA, 21 bp, Artificial Sequence
  primer
taagtgacaactgtcccaccc

SEQ ID NO: 110927 - DNA, 21 bp, Artificial Sequence
  primer
gtcacatctagaacctggccc

SEQ ID NO: 110928 - DNA, 20 bp, Artificial Sequence
  primer
agctgagcaagaacctgtgg

SEQ ID NO: 110929 - DNA, 21 bp, Artificial Sequence
  primer
aagggaagacagtgcagcttg

SEQ ID NO: 110930 - DNA, 21 bp, Artificial Sequence
  primer
aacaaggatggatggtggaag

SEQ ID NO: 110931 - DNA, 38 bp, Artificial Sequence
  primer
gtaaaacgacggccagtcaaatcctcccttcacacctg

SEQ ID NO: 110932 - DNA, 21 bp, Artificial Sequence
  primer
ttctctgcttctcaccactcg

SEQ ID NO: 110933 - DNA, 39 bp, Artificial Sequence
  primer
gtaaaacgacggccagtccagggtctccaggttctattc

SEQ ID NO: 110934 - DNA, 20 bp, Artificial Sequence
  primer
gcctccacattctggtgatg

SEQ ID NO: 110935 - DNA, 21 bp, Artificial Sequence
  primer
gctgtgcagtaagcaccagag

SEQ ID NO: 110936 - DNA, 21 bp, Artificial Sequence
  primer
aaatgctgcggagatcttacc

SEQ ID NO: 110937 - DNA, 19 bp, Artificial Sequence
  primer
gtttgcttccattgggcag

SEQ ID NO: 110938 - DNA, 20 bp, Artificial Sequence
  primer
attggttgaactcaggaggc

SEQ ID NO: 110939 - DNA, 22 bp, Artificial Sequence
  primer
tggtctcgcgttagagatgtag

SEQ ID NO: 110940 - DNA, 38 bp, Artificial Sequence
  primer
gtaaaacgacggccagtttcacaaggctgtgactttgg

SEQ ID NO: 110941 - DNA, 20 bp, Artificial Sequence
  primer
aaacttgcccattctgtccc

SEQ ID NO: 110942 - DNA, 40 bp, Artificial Sequence
  primer
gtaaaacgacggccagttgaatccatgaagggataacatc

SEQ ID NO: 110943 - DNA, 21 bp, Artificial Sequence
  primer
gaaggacatcttcagtgtggc

SEQ ID NO: 110944 - DNA, 21 bp, Artificial Sequence
  primer
atccattgcttgggatgagag

SEQ ID NO: 110945 - DNA, 39 bp, Artificial Sequence
  primer
gtaaaacgacggccagtggaagacaacctctggatatgg

SEQ ID NO: 110946 - DNA, 38 bp, Artificial Sequence
  primer
gtaaaacgacggccagtatgttatcttggcttccacgg

SEQ ID NO: 110947 - DNA, 21 bp, Artificial Sequence
  primer
ggacaactccctaagcatccc

SEQ ID NO: 110948 - DNA, 38 bp, Artificial Sequence
  primer
gtaaaacgacggccagttgccttgatttcccaaacttc

SEQ ID NO: 110949 - DNA, 25 bp, Artificial Sequence
  primer
tggttaaaccttgactgatagaagc

SEQ ID NO: 110950 - DNA, 38 bp, Artificial Sequence
  primer
gtaaaacgacggccagtagggccaatgataccaaagtg

SEQ ID NO: 110951 - DNA, 25 bp, Artificial Sequence
  primer
ctagagaaatcctagctcaatttgc

SEQ ID NO: 110952 - DNA, 19 bp, Artificial Sequence
  primer
gcatgagccactatgcctg

SEQ ID NO: 110953 - DNA, 39 bp, Artificial Sequence
  primer
gtaaaacgacggccagtcaagcgatccatgattataccc

SEQ ID NO: 110954 - DNA, 26 bp, Artificial Sequence
  primer
aaacaaagtcatctgtcctctatttg

SEQ ID NO: 110955 - DNA, 37 bp, Artificial Sequence
  primer
gtaaaacgacggccagtctccagataccgagggacag

SEQ ID NO: 110956 - DNA, 43 bp, Artificial Sequence
  primer
gtaaaacgacggccagtcgtgagagagaaatgttagttcactg

SEQ ID NO: 110957 - DNA, 21 bp, Artificial Sequence
  primer
tcactggaatgctgtcacaag

SEQ ID NO: 110958 - DNA, 38 bp, Artificial Sequence
  primer
gtaaaacgacggccagtttgaatgcagtggtcatttcc

SEQ ID NO: 110959 - DNA, 25 bp, Artificial Sequence
  primer
tgaattccaatgaatgcctataatc

SEQ ID NO: 110960 - DNA, 21 bp, Artificial Sequence
  primer
gaagaaagagccaaaggcttg

SEQ ID NO: 110961 - DNA, 39 bp, Artificial Sequence
  primer
gtaaaacgacggccagttttatacagtgaagacggtggg

SEQ ID NO: 110962 - DNA, 41 bp, Artificial Sequence
  primer
gtaaaacgacggccagtggtcctttggctactaaggaacag

SEQ ID NO: 110963 - DNA, 21 bp, Artificial Sequence
  primer
ggaacccagtatcaggagctg

SEQ ID NO: 110964 - DNA, 47 bp, Artificial Sequence
  primer
gtaaaacgacggccagtgaaattagtcttaaataccaaacaactgaa

SEQ ID NO: 110965 - DNA, 38 bp, Artificial Sequence
  primer
gtaaaacgacggccagttggtgtgacatcaaatttccc

SEQ ID NO: 110966 - DNA, 38 bp, Artificial Sequence
  primer
gtaaaacgacggccagttcaccttcacaccaactgtgg

SEQ ID NO: 110967 - DNA, 20 bp, Artificial Sequence
  primer
aaacaggctacgtgtttggc

SEQ ID NO: 110968 - DNA, 21 bp, Artificial Sequence
  primer
gtgttggtgaagagtgttcgg

SEQ ID NO: 110969 - DNA, 38 bp, Artificial Sequence
  primer
gtaaaacgacggccagtcaggtcactttgggtcacttg

SEQ ID NO: 110970 - DNA, 22 bp, Artificial Sequence
  primer
caacgatgtcaacagctttcag

SEQ ID NO: 110971 - DNA, 20 bp, Artificial Sequence
  primer
ggtcacctgggacagttgtg

SEQ ID NO: 110972 - DNA, 21 bp, Artificial Sequence
  primer
cagagcagacgttcacacagc

SEQ ID NO: 110973 - DNA, 20 bp, Artificial Sequence
  primer
catctcagacaccacctccc

SEQ ID NO: 110974 - DNA, 21 bp, Artificial Sequence
  primer
gcccagccctgtcttcttaac

SEQ ID NO: 110975 - DNA, 20 bp, Artificial Sequence
  primer
acacagacagcaggtggagg

SEQ ID NO: 110976 - DNA, 38 bp, Artificial Sequence
  primer
gtaaaacgacggccagtcaacccaggagaagtgaggac

SEQ ID NO: 110977 - DNA, 37 bp, Artificial Sequence
  primer
gtaaaacgacggccagtaaaggagtgtgatggcgttg

SEQ ID NO: 110978 - DNA, 20 bp, Artificial Sequence
  primer
caacaaacgcctggttcaag

SEQ ID NO: 110979 - DNA, 21 bp, Artificial Sequence
  primer
cagtgggccacactttaccag

SEQ ID NO: 110980 - DNA, 18 bp, Artificial Sequence
  primer
gccttgtgagccaaggtg

SEQ ID NO: 110981 - DNA, 35 bp, Artificial Sequence
  primer
gtaaaacgacggccagtgtcaggtgtggcaccagg

SEQ ID NO: 110982 - DNA, 21 bp, Artificial Sequence
  primer
tttctttaccttcccacaccc

SEQ ID NO: 110983 - DNA, 38 bp, Artificial Sequence
  primer
gtaaaacgacggccagttcaaacaactctggcgaacag

SEQ ID NO: 110984 - DNA, 39 bp, Artificial Sequence
  primer
gtaaaacgacggccagtttaaaccaaacgcatgaacaaa

SEQ ID NO: 110985 - DNA, 21 bp, Artificial Sequence
  primer
caagaaccttcccaggctaag

SEQ ID NO: 110986 - DNA, 21 bp, Artificial Sequence
  primer
tcattcctgtctctggattgc

SEQ ID NO: 110987 - DNA, 38 bp, Artificial Sequence
  primer
gtaaaacgacggccagtaggaatacagttccctgagcc

SEQ ID NO: 110988 - DNA, 21 bp, Artificial Sequence
  primer
aaaggcctcttccctagaacc

SEQ ID NO: 110989 - DNA, 36 bp, Artificial Sequence
  primer
gtaaaacgacggccagtttccacaacagacctccct

SEQ ID NO: 110990 - DNA, 21 bp, Artificial Sequence
  primer
ttctatggtgtcccactgctc

SEQ ID NO: 110991 - DNA, 36 bp, Artificial Sequence
  primer
gtaaaacgacggccagtatggctatcactggcctgg

SEQ ID NO: 110992 - DNA, 39 bp, Artificial Sequence
  primer
gtaaaacgacggccagtcaagacaggtttcctaacacgc

SEQ ID NO: 110993 - DNA, 38 bp, Artificial Sequence
  primer
gtaaaacgacggccagtctcccaccaacatctttccag

SEQ ID NO: 110994 - DNA, 20 bp, Artificial Sequence
  primer
agatcgcaccaccacacttc

SEQ ID NO: 110995 - DNA, 38 bp, Artificial Sequence
  primer
gtaaaacgacggccagtcccatgaccagagttctaggg

SEQ ID NO: 110996 - DNA, 21 bp, Artificial Sequence
  primer
ccggaagaacttctcacagag

SEQ ID NO: 110997 - DNA, 37 bp, Artificial Sequence
  primer
gtaaaacgacggccagtctcctgggatggaagcagac

SEQ ID NO: 110998 - DNA, 21 bp, Artificial Sequence
  primer
atacaccctgccaaggttctg

SEQ ID NO: 110999 - DNA, 18 bp, Artificial Sequence
  primer
agcaagtacaccagcgcc

SEQ ID NO: 111000 - DNA, 36 bp, Artificial Sequence
  primer
gtaaaacgacggccagtcctttggacgcctatgctg

SEQ ID NO: 111001 - DNA, 21 bp, Artificial Sequence
  primer
ttcatttaagctggcaaagcc

SEQ ID NO: 111002 - DNA, 38 bp, Artificial Sequence
  primer
gtaaaacgacggccagtataaactgcccagtgtcccag

SEQ ID NO: 111003 - DNA, 38 bp, Artificial Sequence
  primer
gtaaaacgacggccagtgaagagggaataggtcagggc

SEQ ID NO: 111004 - DNA, 39 bp, Artificial Sequence
  primer
gtaaaacgacggccagttggaagggtagagaacaaaccc

SEQ ID NO: 111005 - DNA, 22 bp, Artificial Sequence
  primer
aatgccatttaaacgaaacacg

SEQ ID NO: 111006 - DNA, 38 bp, Artificial Sequence
  primer
gtaaaacgacggccagtctgtggtgaacgagagctgac

SEQ ID NO: 111007 - DNA, 38 bp, Artificial Sequence
  primer
gtaaaacgacggccagttagagatggtcgtcctcccag

SEQ ID NO: 111008 - DNA, 20 bp, Artificial Sequence
  primer
acagtgtccacacctggctc

SEQ ID NO: 111009 - DNA, 38 bp, Artificial Sequence
  primer
gtaaaacgacggccagtagtggcaaggtattaggctgc

SEQ ID NO: 111010 - DNA, 21 bp, Artificial Sequence
  primer
caccaaaggtggtttggtctc

SEQ ID NO: 111011 - DNA, 20 bp, Artificial Sequence
  primer
cagccggagttacgtcagag

SEQ ID NO: 111012 - DNA, 39 bp, Artificial Sequence
  primer
gtaaaacgacggccagttccggatatatttgggtcacac

SEQ ID NO: 111013 - DNA, 38 bp, Artificial Sequence
  primer
gtaaaacgacggccagtgccttaggagtttcccgagtc

SEQ ID NO: 111014 - DNA, 21 bp, Artificial Sequence
  primer
caatccctcatttcaagctcc

SEQ ID NO: 111015 - DNA, 21 bp, Artificial Sequence
  primer
ctcttcctcctcttccagcag

SEQ ID NO: 111016 - DNA, 37 bp, Artificial Sequence
  primer
gtaaaacgacggccagtcaaagtcacacagccagcag

SEQ ID NO: 111017 - DNA, 37 bp, Artificial Sequence
  primer
gtaaaacgacggccagtgagaaaggcatgcaaaggtg

SEQ ID NO: 111018 - DNA, 38 bp, Artificial Sequence
  primer
gtaaaacgacggccagtgtaagagctgggatcacccac

SEQ ID NO: 111019 - DNA, 21 bp, Artificial Sequence
  primer
gtgaagccacctcagtgacat

SEQ ID NO: 111020 - DNA, 21 bp, Artificial Sequence
  primer
gccacctaagtgacatccacc

SEQ ID NO: 111021 - DNA, 23 bp, Artificial Sequence
  primer
gaaacaaccatttcctgtagctc

SEQ ID NO: 111022 - DNA, 21 bp, Artificial Sequence
  primer
tccacacttgactccagatcc

SEQ ID NO: 111023 - DNA, 25 bp, Artificial Sequence
  primer
ggaaccatacaaaccaccatataac

SEQ ID NO: 111024 - DNA, 39 bp, Artificial Sequence
  primer
gtaaaacgacggccagtagccagctgttggatctaattc

SEQ ID NO: 111025 - DNA, 39 bp, Artificial Sequence
  primer
gtaaaacgacggccagtggaaacaaagttgatggcaatg

SEQ ID NO: 111026 - DNA, 19 bp, Artificial Sequence
  primer
aactgcaggccactcaacc

SEQ ID NO: 111027 - DNA, 19 bp, Artificial Sequence
  primer
caacccatgcaccctaacc

SEQ ID NO: 111028 - DNA, 38 bp, Artificial Sequence
  primer
gtaaaacgacggccagtctcagccaatgagtcttccag

SEQ ID NO: 111029 - DNA, 37 bp, Artificial Sequence
  primer
gtaaaacgacggccagtggaaagggagacagggagac

SEQ ID NO: 111030 - DNA, 21 bp, Artificial Sequence
  primer
atgtaacaaacctgcccattg

SEQ ID NO: 111031 - DNA, 45 bp, Artificial Sequence
  primer
gtaaaacgacggccagttttattatctgttctggagtccaatcta

SEQ ID NO: 111032 - DNA, 21 bp, Artificial Sequence
  primer
tgtaatggaaaggcaccagac

SEQ ID NO: 111033 - DNA, 40 bp, Artificial Sequence
  primer
gtaaaacgacggccagtaaatcggcctctacaaccttaaa

SEQ ID NO: 111034 - DNA, 21 bp, Artificial Sequence
  primer
tccagagttcaaatccctgct

SEQ ID NO: 111035 - DNA, 23 bp, Artificial Sequence
  primer
aacagaaggcagtgggaagtatc

SEQ ID NO: 111036 - DNA, 38 bp, Artificial Sequence
  primer
gtaaaacgacggccagtttgtgtaatccagaaggccag

SEQ ID NO: 111037 - DNA, 21 bp, Artificial Sequence
  primer
tggagaatgaggtgggtacag

SEQ ID NO: 111038 - DNA, 25 bp, Artificial Sequence
  primer
gaagtcctaattatattcccacacc

SEQ ID NO: 111039 - DNA, 21 bp, Artificial Sequence
  primer
ttcatcagatctcagccatcc

SEQ ID NO: 111040 - DNA, 20 bp, Artificial Sequence
  primer
ctaacgggccctgtgaagac

SEQ ID NO: 111041 - DNA, 21 bp, Artificial Sequence
  primer
atctgtgacccacctgagacc

SEQ ID NO: 111042 - DNA, 22 bp, Artificial Sequence
  primer
tccagaccaatgatgactaccc

SEQ ID NO: 111043 - DNA, 38 bp, Artificial Sequence
  primer
gtaaaacgacggccagtagtcccagtgtgggaactgtg

SEQ ID NO: 111044 - DNA, 35 bp, Artificial Sequence
  primer
gtaaaacgacggccagtgggagggtcactgtggtg

SEQ ID NO: 111045 - DNA, 20 bp, Artificial Sequence
  primer
tgagatgatcctgggcaaac

SEQ ID NO: 111046 - DNA, 38 bp, Artificial Sequence
  primer
gtaaaacgacggccagtagacagacaagggtagcaggc

SEQ ID NO: 111047 - DNA, 38 bp, Artificial Sequence
  primer
gtaaaacgacggccagttccctgagatgtgacttggag

SEQ ID NO: 111048 - DNA, 21 bp, Artificial Sequence
  primer
tttccagtggaccaaagacag

SEQ ID NO: 111049 - DNA, 21 bp, Artificial Sequence
  primer
agtactgggcactgggaagac

SEQ ID NO: 111050 - DNA, 21 bp, Artificial Sequence
  primer
agacagaaacagggtgttgcc

SEQ ID NO: 111051 - DNA, 20 bp, Artificial Sequence
  primer
ctgcctcctatacgtggtgc

SEQ ID NO: 111052 - DNA, 21 bp, Artificial Sequence
  primer
ttcactaacaggcaaacgcag

SEQ ID NO: 111053 - DNA, 20 bp, Artificial Sequence
  primer
agttgcccaccaagtcagtg

SEQ ID NO: 111054 - DNA, 21 bp, Artificial Sequence
  primer
cccacatcctagacctatccc

SEQ ID NO: 111055 - DNA, 38 bp, Artificial Sequence
  primer
gtaaaacgacggccagttcctgcagattccctctcttc

SEQ ID NO: 111056 - DNA, 21 bp, Artificial Sequence
  primer
tctgagaaggtggtggcatag

SEQ ID NO: 111057 - DNA, 38 bp, Artificial Sequence
  primer
gtaaaacgacggccagtttcctggtgaaattggattgg

SEQ ID NO: 111058 - DNA, 21 bp, Artificial Sequence
  primer
taggacaaatctcagccctgc

SEQ ID NO: 111059 - DNA, 21 bp, Artificial Sequence
  primer
cagacactgttgaatggaggg

SEQ ID NO: 111060 - DNA, 39 bp, Artificial Sequence
  primer
gtaaaacgacggccagtggattatgaagttccctttggc

SEQ ID NO: 111061 - DNA, 25 bp, Artificial Sequence
  primer
tggcaatgcactttattagaatatg

SEQ ID NO: 111062 - DNA, 38 bp, Artificial Sequence
  primer
gtaaaacgacggccagtttgggtgcctctcttctaagg

SEQ ID NO: 111063 - DNA, 36 bp, Artificial Sequence
  primer
gtaaaacgacggccagtctgcaggctgctggattag

SEQ ID NO: 111064 - DNA, 21 bp, Artificial Sequence
  primer
tgtagcttcctgggtgtttcc

SEQ ID NO: 111065 - DNA, 38 bp, Artificial Sequence
  primer
gtaaaacgacggccagtgcagtatgtttggtggaggtg

SEQ ID NO: 111066 - DNA, 39 bp, Artificial Sequence
  primer
gtaaaacgacggccagttctgcttcctctagctccagtg

SEQ ID NO: 111067 - DNA, 38 bp, Artificial Sequence
  primer
gtaaaacgacggccagtcctctgtgaggctcttgtgag

SEQ ID NO: 111068 - DNA, 21 bp, Artificial Sequence
  primer
gttggacagccagattcaagc

SEQ ID NO: 111069 - DNA, 23 bp, Artificial Sequence
  primer
acacatcatggtgtcacagtttg

SEQ ID NO: 111070 - DNA, 38 bp, Artificial Sequence
  primer
gtaaaacgacggccagtcagcttcctttgtccaagtcc

SEQ ID NO: 111071 - DNA, 37 bp, Artificial Sequence
  primer
gtaaaacgacggccagtgggttcccagaggaaatcag

SEQ ID NO: 111072 - DNA, 21 bp, Artificial Sequence
  primer
ggcccatttgatattggtgtc

SEQ ID NO: 111073 - DNA, 20 bp, Artificial Sequence
  primer
tctgcccatggctcacttac

SEQ ID NO: 111074 - DNA, 21 bp, Artificial Sequence
  primer
tttgggtgtgggatatcaagg

SEQ ID NO: 111075 - DNA, 39 bp, Artificial Sequence
  primer
gtaaaacgacggccagttcagcaatgtaggaggaattgg

SEQ ID NO: 111076 - DNA, 38 bp, Artificial Sequence
  primer
gtaaaacgacggccagtcaacatcatccaatgaccaca

SEQ ID NO: 111077 - DNA, 35 bp, Artificial Sequence
  primer
gtaaaacgacggccagtaggctgctaacgggcctc

SEQ ID NO: 111078 - DNA, 21 bp, Artificial Sequence
  primer
aaatgtccagaaattgggtgc

SEQ ID NO: 111079 - DNA, 41 bp, Artificial Sequence
  primer
gtaaaacgacggccagtgaaggtaagtaaattcagaggccc

SEQ ID NO: 111080 - DNA, 27 bp, Artificial Sequence
  primer
caaatcctttacttaccagtggaagac

SEQ ID NO: 111081 - DNA, 38 bp, Artificial Sequence
  primer
gtaaaacgacggccagtagcttctgagcatcactggtc

SEQ ID NO: 111082 - DNA, 21 bp, Artificial Sequence
  primer
aggtcccagggagtttcagac

SEQ ID NO: 111083 - DNA, 21 bp, Artificial Sequence
  primer
tggtacttcttgaaggaggcg

SEQ ID NO: 111084 - DNA, 37 bp, Artificial Sequence
  primer
gtaaaacgacggccagtaggtagaccacgggcttgag

SEQ ID NO: 111085 - DNA, 39 bp, Artificial Sequence
  primer
gtaaaacgacggccagtcacattgaaggtgatccagttg

SEQ ID NO: 111086 - DNA, 37 bp, Artificial Sequence
  primer
gtaaaacgacggccagtgtgttgtgtggcctttcctc

SEQ ID NO: 111087 - DNA, 36 bp, Artificial Sequence
  primer
gtaaaacgacggccagtactgctgttgccaggtgtg

SEQ ID NO: 111088 - DNA, 21 bp, Artificial Sequence
  primer
tccgacttcacgcctctaaac

SEQ ID NO: 111089 - DNA, 26 bp, Artificial Sequence
  primer
ttgctgatactaagctacaaaccatc

SEQ ID NO: 111090 - DNA, 40 bp, Artificial Sequence
  primer
gtaaaacgacggccagttgctaatatccagctgtgtttcc

SEQ ID NO: 111091 - DNA, 21 bp, Artificial Sequence
  primer
ctggcccgaatgtgatttaac

SEQ ID NO: 111092 - DNA, 24 bp, Artificial Sequence
  primer
ggaaattactgcagatacgtcaac

SEQ ID NO: 111093 - DNA, 43 bp, Artificial Sequence
  primer
gtaaaacgacggccagtggttcatacttaatcatttctgcatc

SEQ ID NO: 111094 - DNA, 26 bp, Artificial Sequence
  primer
cctgtttctcccacacacttaaatac

SEQ ID NO: 111095 - DNA, 21 bp, Artificial Sequence
  primer
gcacctgtaaggagatctggc

SEQ ID NO: 111096 - DNA, 21 bp, Artificial Sequence
  primer
tacccaggtacaccatgaggc

SEQ ID NO: 111097 - DNA, 39 bp, Artificial Sequence
  primer
gtaaaacgacggccagtcaaggaacaattaatgccatgc

SEQ ID NO: 111098 - DNA, 19 bp, Artificial Sequence
  primer
cagcccaggatccttcaac

SEQ ID NO: 111099 - DNA, 39 bp, Artificial Sequence
  primer
gtaaaacgacggccagtgatggcaatatcatatccaggg

SEQ ID NO: 111100 - DNA, 41 bp, Artificial Sequence
  primer
gtaaaacgacggccagtcaaagaggctttcatttaatctgc

SEQ ID NO: 111101 - DNA, 22 bp, Artificial Sequence
  primer
ctcctactccatgggttctcag

SEQ ID NO: 111102 - DNA, 38 bp, Artificial Sequence
  primer
gtaaaacgacggccagtcaagctatgatcgagccactg

SEQ ID NO: 111103 - DNA, 21 bp, Artificial Sequence
  primer
ctactgggccaacaaacaatg

SEQ ID NO: 111104 - DNA, 39 bp, Artificial Sequence
  primer
gtaaaacgacggccagttcaatatcaccacttcaggcag

SEQ ID NO: 111105 - DNA, 38 bp, Artificial Sequence
  primer
gtaaaacgacggccagtagcactcatggctgcttagac

SEQ ID NO: 111106 - DNA, 19 bp, Artificial Sequence
  primer
cataacgcctggcacacag

SEQ ID NO: 111107 - DNA, 41 bp, Artificial Sequence
  primer
gtaaaacgacggccagtggagcttctagtaaacccttggtc

SEQ ID NO: 111108 - DNA, 21 bp, Artificial Sequence
  primer
ctaaccatcactgcctcctga

SEQ ID NO: 111109 - DNA, 21 bp, Artificial Sequence
  primer
ctctggtctcggcaacaagtc

SEQ ID NO: 111110 - DNA, 21 bp, Artificial Sequence
  primer
gaaagatgcaaaccaagaccc

SEQ ID NO: 111111 - DNA, 38 bp, Artificial Sequence
  primer
gtaaaacgacggccagttttctccctgaaggaaacacc

SEQ ID NO: 111112 - DNA, 39 bp, Artificial Sequence
  primer
gtaaaacgacggccagtcacaaactaaccaatgcaaagc

SEQ ID NO: 111113 - DNA, 38 bp, Artificial Sequence
  primer
gtaaaacgacggccagtgcagtgacttgtgggaaacag

SEQ ID NO: 111114 - DNA, 25 bp, Artificial Sequence
  primer
ctctgtgaacgttaagggtctattt

SEQ ID NO: 111115 - DNA, 40 bp, Artificial Sequence
  primer
gtaaaacgacggccagttcagaggtctcagagtatttggg

SEQ ID NO: 111116 - DNA, 27 bp, Artificial Sequence
  primer
aaatcacatcctttatttattcaaaca

SEQ ID NO: 111117 - DNA, 24 bp, Artificial Sequence
  primer
tttctttcatcttgctggtgtatc

SEQ ID NO: 111118 - DNA, 21 bp, Artificial Sequence
  primer
tcctaccaactcagcctcctg

SEQ ID NO: 111119 - DNA, 38 bp, Artificial Sequence
  primer
gtaaaacgacggccagtctgagactgggtctctccacc

SEQ ID NO: 111120 - DNA, 39 bp, Artificial Sequence
  primer
gtaaaacgacggccagttttcaatgcagaaacaaactgc

SEQ ID NO: 111121 - DNA, 38 bp, Artificial Sequence
  primer
gtaaaacgacggccagtggaaaccagaagaatcatggc

SEQ ID NO: 111122 - DNA, 38 bp, Artificial Sequence
  primer
gtaaaacgacggccagtctgctctcttcatccaatccc

SEQ ID NO: 111123 - DNA, 37 bp, Artificial Sequence
  primer
gtaaaacgacggccagtaaggccaagcttgaaagcag

SEQ ID NO: 111124 - DNA, 38 bp, Artificial Sequence
  primer
gtaaaacgacggccagtcctggctttacaaacaaaggc

SEQ ID NO: 111125 - DNA, 22 bp, Artificial Sequence
  primer
caacagagcaagacccagtttc

SEQ ID NO: 111126 - DNA, 21 bp, Artificial Sequence
  primer
gcttgcctttgtgggtttaag

SEQ ID NO: 111127 - DNA, 19 bp, Artificial Sequence
  primer
aaaccgtctgctgcatgtg

SEQ ID NO: 111128 - DNA, 21 bp, Artificial Sequence
  primer
agtcctgttccctgaatgacc

SEQ ID NO: 111129 - DNA, 38 bp, Artificial Sequence
  primer
gtaaaacgacggccagtacagtcacactgaccctgagc

SEQ ID NO: 111130 - DNA, 19 bp, Artificial Sequence
  primer
gctggagcagttcagtggg

SEQ ID NO: 111131 - DNA, 19 bp, Artificial Sequence
  primer
cagcactggacagcaggag

SEQ ID NO: 111132 - DNA, 37 bp, Artificial Sequence
  primer
gtaaaacgacggccagtcatctggccaaagaggttgg

SEQ ID NO: 111133 - DNA, 20 bp, Artificial Sequence
  primer
gaaggtctcccactgcttcc

SEQ ID NO: 111134 - DNA, 38 bp, Artificial Sequence
  primer
gtaaaacgacggccagtagaacctgggcagagagagag

SEQ ID NO: 111135 - DNA, 22 bp, Artificial Sequence
  primer
cacagttcaggtgataagcagg

SEQ ID NO: 111136 - DNA, 20 bp, Artificial Sequence
  primer
gggttctcgggtacatttcc

SEQ ID NO: 111137 - DNA, 21 bp, Artificial Sequence
  primer
aggactccttcatcacccatc

SEQ ID NO: 111138 - DNA, 41 bp, Artificial Sequence
  primer
gtaaaacgacggccagttgagaagcaataaagagaagggac

SEQ ID NO: 111139 - DNA, 23 bp, Artificial Sequence
  primer
tcttcatcccaagcataacaaag

SEQ ID NO: 111140 - DNA, 19 bp, Artificial Sequence
  primer
agggatggtaagggttggg

SEQ ID NO: 111141 - DNA, 39 bp, Artificial Sequence
  primer
gtaaaacgacggccagtaagaattgcctgaaggtacacg

SEQ ID NO: 111142 - DNA, 43 bp, Artificial Sequence
  primer
gtaaaacgacggccagtccagatattaagaagaaggtaaaggg

SEQ ID NO: 111143 - DNA, 43 bp, Artificial Sequence
  primer
gtaaaacgacggccagttctgagaaggcttcctataaatcaga

SEQ ID NO: 111144 - DNA, 24 bp, Artificial Sequence
  primer
tgctaggtataaacttgcgctacc

SEQ ID NO: 111145 - DNA, 39 bp, Artificial Sequence
  primer
gtaaaacgacggccagtaaaggcaactgatcaaggactg

SEQ ID NO: 111146 - DNA, 36 bp, Artificial Sequence
  primer
gtaaaacgacggccagtcccatgcaaatacccaacc

SEQ ID NO: 111147 - DNA, 30 bp, Artificial Sequence
  primer
agttaaggagtaagtattccaatcctagag

SEQ ID NO: 111148 - DNA, 22 bp, Artificial Sequence
  primer
ctttaagctcagccacatttga

SEQ ID NO: 111149 - DNA, 40 bp, Artificial Sequence
  primer
gtaaaacgacggccagtccttgagtaacaggtatcaggca

SEQ ID NO: 111150 - DNA, 38 bp, Artificial Sequence
  primer
gtaaaacgacggccagtgagtgaaggtcatagcggagg

SEQ ID NO: 111151 - DNA, 39 bp, Artificial Sequence
  primer
gtaaaacgacggccagtgagagcacgcctctaagttcag

SEQ ID NO: 111152 - DNA, 38 bp, Artificial Sequence
  primer
gtaaaacgacggccagtctccaggtccaagaaaccaag

SEQ ID NO: 111153 - DNA, 21 bp, Artificial Sequence
  primer
tcctcgagtgtatgggtttcc

SEQ ID NO: 111154 - DNA, 38 bp, Artificial Sequence
  primer
gtaaaacgacggccagtgaggagacaggttccacgaag

SEQ ID NO: 111155 - DNA, 37 bp, Artificial Sequence
  primer
gtaaaacgacggccagtccaagcctgggagatctgag

SEQ ID NO: 111156 - DNA, 38 bp, Artificial Sequence
  primer
gtaaaacgacggccagtacgactctgtggtcatgatgg

SEQ ID NO: 111157 - DNA, 20 bp, Artificial Sequence
  primer
cacgttctcagggatggatg

SEQ ID NO: 111158 - DNA, 38 bp, Artificial Sequence
  primer
gtaaaacgacggccagtaccaccagctccgttaggttc

SEQ ID NO: 111159 - DNA, 21 bp, Artificial Sequence
  primer
agggttagagccaggaatcag

SEQ ID NO: 111160 - DNA, 20 bp, Artificial Sequence
  primer
gtagatccacgctcacctcg

SEQ ID NO: 111161 - DNA, 37 bp, Artificial Sequence
  primer
gtaaaacgacggccagtgtattggcgtccacgttcag

SEQ ID NO: 111162 - DNA, 37 bp, Artificial Sequence
  primer
gtaaaacgacggccagtctcagcagggacacctgaag

SEQ ID NO: 111163 - DNA, 22 bp, Artificial Sequence
  primer
cggccatctactgtacctatcg

SEQ ID NO: 111164 - DNA, 38 bp, Artificial Sequence
  primer
gtaaaacgacggccagtaaccctgccagttcagacaag

SEQ ID NO: 111165 - DNA, 21 bp, Artificial Sequence
  primer
agagctgataggatcgaaggg

SEQ ID NO: 111166 - DNA, 37 bp, Artificial Sequence
  primer
gtaaaacgacggccagttttcgtcacgttgccctaac

SEQ ID NO: 111167 - DNA, 38 bp, Artificial Sequence
  primer
gtaaaacgacggccagtgggaggtcaaagtgtcctctg

SEQ ID NO: 111168 - DNA, 38 bp, Artificial Sequence
  primer
gtaaaacgacggccagtctccgccttctagactcaagc

SEQ ID NO: 111169 - DNA, 38 bp, Artificial Sequence
  primer
gtaaaacgacggccagtgaggtgagatgtctggatggg

SEQ ID NO: 111170 - DNA, 38 bp, Artificial Sequence
  primer
gtaaaacgacggccagttcagatatttgcccaagaccc

SEQ ID NO: 111171 - DNA, 21 bp, Artificial Sequence
  primer
gatggatagggaagttgtggc

SEQ ID NO: 111172 - DNA, 20 bp, Artificial Sequence
  primer
gtgagaggagagggtttggg

SEQ ID NO: 111173 - DNA, 22 bp, Artificial Sequence
  primer
tcttaagatcagcgactctggg

SEQ ID NO: 111174 - DNA, 38 bp, Artificial Sequence
  primer
gtaaaacgacggccagtgcaccagagaaattcaccagg

SEQ ID NO: 111175 - DNA, 21 bp, Artificial Sequence
  primer
taggatccacttcccgttctg

SEQ ID NO: 111176 - DNA, 38 bp, Artificial Sequence
  primer
gtaaaacgacggccagtatacacgttctcaaggctccg

SEQ ID NO: 111177 - DNA, 21 bp, Artificial Sequence
  primer
tgggacacaaaccactgagag

SEQ ID NO: 111178 - DNA, 39 bp, Artificial Sequence
  primer
gtaaaacgacggccagtgagaacagacggttatgatggg

SEQ ID NO: 111179 - DNA, 36 bp, Artificial Sequence
  primer
gtaaaacgacggccagtcacgtgtgtttccagcagc

SEQ ID NO: 111180 - DNA, 21 bp, Artificial Sequence
  primer
gttgtacaaatccaggagccc

SEQ ID NO: 111181 - DNA, 38 bp, Artificial Sequence
  primer
gtaaaacgacggccagtatgtattctccacccagaccc

SEQ ID NO: 111182 - DNA, 21 bp, Artificial Sequence
  primer
agcatcagcttgttctcctcc

SEQ ID NO: 111183 - DNA, 21 bp, Artificial Sequence
  primer
actgtctcccgagatgtccac

SEQ ID NO: 111184 - DNA, 38 bp, Artificial Sequence
  primer
gtaaaacgacggccagtaggtgttcctcagactcccac

SEQ ID NO: 111185 - DNA, 38 bp, Artificial Sequence
  primer
gtaaaacgacggccagtgaatgactcatgtggtctgcc

SEQ ID NO: 111186 - DNA, 38 bp, Artificial Sequence
  primer
gtaaaacgacggccagtctatgctgattcacctgccac

SEQ ID NO: 111187 - DNA, 43 bp, Artificial Sequence
  primer
gtaaaacgacggccagtgggaagggaagtaggtagagaataag

SEQ ID NO: 111188 - DNA, 37 bp, Artificial Sequence
  primer
gtaaaacgacggccagtactgctcactgaaaggcagc

SEQ ID NO: 111189 - DNA, 38 bp, Artificial Sequence
  primer
gtaaaacgacggccagtactcttcaatgctaggcggtc

SEQ ID NO: 111190 - DNA, 38 bp, Artificial Sequence
  primer
gtaaaacgacggccagttgtttgcagtcactgagggtc

SEQ ID NO: 111191 - DNA, 38 bp, Artificial Sequence
  primer
gtaaaacgacggccagtatcccaaagagcctttccaag

SEQ ID NO: 111192 - DNA, 21 bp, Artificial Sequence
  primer
ttgcccatattcctacttggc

SEQ ID NO: 111193 - DNA, 21 bp, Artificial Sequence
  primer
tttctccctactcatcagccg

SEQ ID NO: 111194 - DNA, 19 bp, Artificial Sequence
  primer
ccagtagcatctgcccagc

SEQ ID NO: 111195 - DNA, 37 bp, Artificial Sequence
  primer
gtaaaacgacggccagtagaaaggccaccaggaactg

SEQ ID NO: 111196 - DNA, 39 bp, Artificial Sequence
  primer
gtaaaacgacggccagtctgtgggtttctgggaatagac

SEQ ID NO: 111197 - DNA, 38 bp, Artificial Sequence
  primer
gtaaaacgacggccagtggacctagacattggtggtgg

SEQ ID NO: 111198 - DNA, 20 bp, Artificial Sequence
  primer
agaggaacagagagctgccc

SEQ ID NO: 111199 - DNA, 21 bp, Artificial Sequence
  primer
tgtctgacctcccttccattc

SEQ ID NO: 111200 - DNA, 38 bp, Artificial Sequence
  primer
gtaaaacgacggccagttcggtgcattgtggaataaac

SEQ ID NO: 111201 - DNA, 38 bp, Artificial Sequence
  primer
gtaaaacgacggccagtcactttcagacgcatcttccc

SEQ ID NO: 111202 - DNA, 21 bp, Artificial Sequence
  primer
ctccagcctgaacaacaagag

SEQ ID NO: 111203 - DNA, 21 bp, Artificial Sequence
  primer
aggagagggtgttaggaaggc

SEQ ID NO: 111204 - DNA, 18 bp, Artificial Sequence
  primer
aggcatgagccactgtgc

SEQ ID NO: 111205 - DNA, 38 bp, Artificial Sequence
  primer
gtaaaacgacggccagtgaagagcttcctagctgtcgc

SEQ ID NO: 111206 - DNA, 21 bp, Artificial Sequence
  primer
cccactcgtctctcctgaaac

SEQ ID NO: 111207 - DNA, 37 bp, Artificial Sequence
  primer
gtaaaacgacggccagtgaacagccggtgtatgatgc

SEQ ID NO: 111208 - DNA, 37 bp, Artificial Sequence
  primer
gtaaaacgacggccagtacggtgtcgcgtacctgtag

SEQ ID NO: 111209 - DNA, 36 bp, Artificial Sequence
  primer
gtaaaacgacggccagtctggtacttggcatggctg

SEQ ID NO: 111210 - DNA, 20 bp, Artificial Sequence
  primer
actcacagctgaggactgcc

SEQ ID NO: 111211 - DNA, 19 bp, Artificial Sequence
  primer
gagctgggctcggttctac

SEQ ID NO: 111212 - DNA, 21 bp, Artificial Sequence
  primer
accctgaacccaaacctaagc

SEQ ID NO: 111213 - DNA, 22 bp, Artificial Sequence
  primer
ggctgtggaatagcttgtatcc

SEQ ID NO: 111214 - DNA, 21 bp, Artificial Sequence
  primer
caagacttgggaaccctaccc

SEQ ID NO: 111215 - DNA, 38 bp, Artificial Sequence
  primer
gtaaaacgacggccagtgaaagaggctttctgctctcg

SEQ ID NO: 111216 - DNA, 37 bp, Artificial Sequence
  primer
gtaaaacgacggccagtgatgtaaacctcgctgcgtc

SEQ ID NO: 111217 - DNA, 21 bp, Artificial Sequence
  primer
atgaaaccagcacatggtgac

SEQ ID NO: 111218 - DNA, 21 bp, Artificial Sequence
  primer
gtaagtgggctccatgctgag

SEQ ID NO: 111219 - DNA, 26 bp, Artificial Sequence
  primer
cagaatgaacagttaatctccaaatc

SEQ ID NO: 111220 - DNA, 27 bp, Artificial Sequence
  primer
tttcaattctgtaattaaactatgctg

SEQ ID NO: 111221 - DNA, 40 bp, Artificial Sequence
  primer
gtaaaacgacggccagtgaagatacggattgtagtcccag

SEQ ID NO: 111222 - DNA, 38 bp, Artificial Sequence
  primer
gtaaaacgacggccagtaaagcatttaggtggatggga

SEQ ID NO: 111223 - DNA, 38 bp, Artificial Sequence
  primer
gtaaaacgacggccagtaatttacccagttgccgacac

SEQ ID NO: 111224 - DNA, 19 bp, Artificial Sequence
  primer
gggcccaaactacaacagg

SEQ ID NO: 111225 - DNA, 41 bp, Artificial Sequence
  primer
gtaaaacgacggccagtttcattaataactgcaacccaaac

SEQ ID NO: 111226 - DNA, 42 bp, Artificial Sequence
  primer
gtaaaacgacggccagtatctaaagcctaatgcctgataatg

SEQ ID NO: 111227 - DNA, 39 bp, Artificial Sequence
  primer
gtaaaacgacggccagtaaggtctgattcaaagacggtg

SEQ ID NO: 111228 - DNA, 44 bp, Artificial Sequence
  primer
gtaaaacgacggccagtccgctttctgctagataaacattattc

SEQ ID NO: 111229 - DNA, 25 bp, Artificial Sequence
  primer
tgggtaaccaacaaagctagtattc

SEQ ID NO: 111230 - DNA, 42 bp, Artificial Sequence
  primer
gtaaaacgacggccagtcaaggtaattgtaagaggtgcattc

SEQ ID NO: 111231 - DNA, 20 bp, Artificial Sequence
  primer
tggatgtgggataagcttgc

SEQ ID NO: 111232 - DNA, 38 bp, Artificial Sequence
  primer
gtaaaacgacggccagtattgctccatcttcacagtgc

SEQ ID NO: 111233 - DNA, 20 bp, Artificial Sequence
  primer
ccatgactgcatcactgcac

SEQ ID NO: 111234 - DNA, 22 bp, Artificial Sequence
  primer
tcacagagtgagaccctgtttc

SEQ ID NO: 111235 - DNA, 22 bp, Artificial Sequence
  primer
cacacacaaaggtcgtcagaag

SEQ ID NO: 111236 - DNA, 21 bp, Artificial Sequence
  primer
agtatgtggtggctgagaggg

SEQ ID NO: 111237 - DNA, 24 bp, Artificial Sequence
  primer
agtatacaagctggaggtttaccc

SEQ ID NO: 111238 - DNA, 21 bp, Artificial Sequence
  primer
tgatcttaaaggtggcttccc

SEQ ID NO: 111239 - DNA, 21 bp, Artificial Sequence
  primer
taaatcacgcctagcagatgg

SEQ ID NO: 111240 - DNA, 38 bp, Artificial Sequence
  primer
gtaaaacgacggccagtgcttgctttctctgcaactcc

SEQ ID NO: 111241 - DNA, 23 bp, Artificial Sequence
  primer
ttgaataccatttgcttgctttc

SEQ ID NO: 111242 - DNA, 19 bp, Artificial Sequence
  primer
aacaggatgagggagtggg

SEQ ID NO: 111243 - DNA, 39 bp, Artificial Sequence
  primer
gtaaaacgacggccagtgcgcccagcctatgtatttaac

SEQ ID NO: 111244 - DNA, 21 bp, Artificial Sequence
  primer
gaaatggaggatggaaagtgc

SEQ ID NO: 111245 - DNA, 28 bp, Artificial Sequence
  primer
tctgttattcatagacatttaaacctgg

SEQ ID NO: 111246 - DNA, 43 bp, Artificial Sequence
  primer
gtaaaacgacggccagtgagactcttcttggcaataataaagc

SEQ ID NO: 111247 - DNA, 21 bp, Artificial Sequence
  primer
cctggcgaaagagtgagacta

SEQ ID NO: 111248 - DNA, 25 bp, Artificial Sequence
  primer
cccttagacctccatagaaggtagc

SEQ ID NO: 111249 - DNA, 20 bp, Artificial Sequence
  primer
ccagtgccacaagtgagaga

SEQ ID NO: 111250 - DNA, 20 bp, Artificial Sequence
  primer
cccacctcttggtccttagc

SEQ ID NO: 111251 - DNA, 21 bp, Artificial Sequence
  primer
gaaacaaagtggctttctccc

SEQ ID NO: 111252 - DNA, 38 bp, Artificial Sequence
  primer
gtaaaacgacggccagtttaattcatgcctcctcctcc

SEQ ID NO: 111253 - DNA, 21 bp, Artificial Sequence
  primer
aaatccaaactgcacagccat

SEQ ID NO: 111254 - DNA, 21 bp, Artificial Sequence
  primer
agcctcccaaactgctaggat

SEQ ID NO: 111255 - DNA, 38 bp, Artificial Sequence
  primer
gtaaaacgacggccagtattgtgcctagctttgggaac

SEQ ID NO: 111256 - DNA, 20 bp, Artificial Sequence
  primer
ccaagcaggaattccagaaa

SEQ ID NO: 111257 - DNA, 41 bp, Artificial Sequence
  primer
gtaaaacgacggccagttcatgagttgtggttgcaattaag

SEQ ID NO: 111258 - DNA, 19 bp, Artificial Sequence
  primer
atgccaaggacgaggacag

SEQ ID NO: 111259 - DNA, 21 bp, Artificial Sequence
  primer
aagacccacccttagctcacc

SEQ ID NO: 111260 - DNA, 21 bp, Artificial Sequence
  primer
gtgaccataaactgggagcag

SEQ ID NO: 111261 - DNA, 21 bp, Artificial Sequence
  primer
gggccaggaaatctacacaag

SEQ ID NO: 111262 - DNA, 37 bp, Artificial Sequence
  primer
gtaaaacgacggccagtatcattcggctcccacttac

SEQ ID NO: 111263 - DNA, 22 bp, Artificial Sequence
  primer
gcctggaatactcttccctgtc

SEQ ID NO: 111264 - DNA, 21 bp, Artificial Sequence
  primer
aggaaccagcatgaatctctg

SEQ ID NO: 111265 - DNA, 38 bp, Artificial Sequence
  primer
gtaaaacgacggccagttgtattcccatgctcgaaatc

SEQ ID NO: 111266 - DNA, 38 bp, Artificial Sequence
  primer
gtaaaacgacggccagttcagctcattccctcttgctc

SEQ ID NO: 111267 - DNA, 21 bp, Artificial Sequence
  primer
agatctagcagcaccagcctc

SEQ ID NO: 111268 - DNA, 21 bp, Artificial Sequence
  primer
catacccgctacttctcctcg

SEQ ID NO: 111269 - DNA, 38 bp, Artificial Sequence
  primer
gtaaaacgacggccagtttctttgaagaagctgctgtt

SEQ ID NO: 111270 - DNA, 39 bp, Artificial Sequence
  primer
gtaaaacgacggccagtgttaggaggtttcagttctggc

SEQ ID NO: 111271 - DNA, 42 bp, Artificial Sequence
  primer
gtaaaacgacggccagtcacatatacaggttgcattctaagc

SEQ ID NO: 111272 - DNA, 43 bp, Artificial Sequence
  primer
gtaaaacgacggccagttctgatgctccatgaaagtattctac

SEQ ID NO: 111273 - DNA, 21 bp, Artificial Sequence
  primer
atcgccacctttctaaacaga

SEQ ID NO: 111274 - DNA, 21 bp, Artificial Sequence
  primer
tgggcggaagtatgagtaacc

SEQ ID NO: 111275 - DNA, 41 bp, Artificial Sequence
  primer
gtaaaacgacggccagtgcctttccaacctaagaatctagc

SEQ ID NO: 111276 - DNA, 38 bp, Artificial Sequence
  primer
gtaaaacgacggccagtgatggagggatggaaagagtc

SEQ ID NO: 111277 - DNA, 26 bp, Artificial Sequence
  primer
aggttaacgcacatatacaagacatc

SEQ ID NO: 111278 - DNA, 46 bp, Artificial Sequence
  primer
gtaaaacgacggccagtttagtttcctaagagtctcacattgataa

SEQ ID NO: 111279 - DNA, 21 bp, Artificial Sequence
  primer
ttagcctttctttgaggctcg

SEQ ID NO: 111280 - DNA, 38 bp, Artificial Sequence
  primer
gtaaaacgacggccagtgcttcaacagacttggaccag

SEQ ID NO: 111281 - DNA, 21 bp, Artificial Sequence
  primer
aggaccacagaaagaccaagc

SEQ ID NO: 111282 - DNA, 39 bp, Artificial Sequence
  primer
gtaaaacgacggccagttcacaactgcaaataatgcaaa

SEQ ID NO: 111283 - DNA, 20 bp, Artificial Sequence
  primer
ggtcagaaaggagctgatgg

SEQ ID NO: 111284 - DNA, 20 bp, Artificial Sequence
  primer
atgttcaggccattgagcag

SEQ ID NO: 111285 - DNA, 22 bp, Artificial Sequence
  primer
actggtccttgctttgagtttc

SEQ ID NO: 111286 - DNA, 38 bp, Artificial Sequence
  primer
gtaaaacgacggccagtcttccctctgatcacccaaac

SEQ ID NO: 111287 - DNA, 36 bp, Artificial Sequence
  primer
gtaaaacgacggccagtcccaagaagcctagcaagc

SEQ ID NO: 111288 - DNA, 22 bp, Artificial Sequence
  primer
ctgctatggctcagaagatgag

SEQ ID NO: 111289 - DNA, 38 bp, Artificial Sequence
  primer
gtaaaacgacggccagtccaccaccaaagtctttctcc

SEQ ID NO: 111290 - DNA, 36 bp, Artificial Sequence
  primer
gtaaaacgacggccagtagtccacacgtggattccc

SEQ ID NO: 111291 - DNA, 21 bp, Artificial Sequence
  primer
tgtgaagtaccatggcaccag

SEQ ID NO: 111292 - DNA, 38 bp, Artificial Sequence
  primer
gtaaaacgacggccagtgatgatgtgaggcactctccc

SEQ ID NO: 111293 - DNA, 39 bp, Artificial Sequence
  primer
gtaaaacgacggccagtttgatgctattccttggctctc

SEQ ID NO: 111294 - DNA, 25 bp, Artificial Sequence
  primer
tggtctacgcttcctttagaatatc

SEQ ID NO: 111295 - DNA, 37 bp, Artificial Sequence
  primer
gtaaaacgacggccagtgccagtaattctgcacgagg

SEQ ID NO: 111296 - DNA, 21 bp, Artificial Sequence
  primer
gagttctgggaagcacagagg

SEQ ID NO: 111297 - DNA, 39 bp, Artificial Sequence
  primer
gtaaaacgacggccagtcatggcaggtgaattatccaag

SEQ ID NO: 111298 - DNA, 42 bp, Artificial Sequence
  primer
gtaaaacgacggccagttggagaagtaattgctttcaatgtc

SEQ ID NO: 111299 - DNA, 21 bp, Artificial Sequence
  primer
ccattccttcatcctgctacc

SEQ ID NO: 111300 - DNA, 42 bp, Artificial Sequence
  primer
gtaaaacgacggccagtcactccctgagacactgttctacac

SEQ ID NO: 111301 - DNA, 46 bp, Artificial Sequence
  primer
gtaaaacgacggccagtgcttgcttgtatatatagtcgaagaattt

SEQ ID NO: 111302 - DNA, 24 bp, Artificial Sequence
  primer
ggttcaaatcctaactctgcttcc

SEQ ID NO: 111303 - DNA, 20 bp, Artificial Sequence
  primer
gaatgcagttgtggtgaccc

SEQ ID NO: 111304 - DNA, 38 bp, Artificial Sequence
  primer
gtaaaacgacggccagtacgaagtaatgtgcatcaccg

SEQ ID NO: 111305 - DNA, 38 bp, Artificial Sequence
  primer
gtaaaacgacggccagtcagctgctgctaatcccaaag

SEQ ID NO: 111306 - DNA, 37 bp, Artificial Sequence
  primer
gtaaaacgacggccagtgcgttccaagcaatgagatg

SEQ ID NO: 111307 - DNA, 21 bp, Artificial Sequence
  primer
atcatcacagcatggttctgc

SEQ ID NO: 111308 - DNA, 38 bp, Artificial Sequence
  primer
gtaaaacgacggccagttctctggcactatcccacctc

SEQ ID NO: 111309 - DNA, 39 bp, Artificial Sequence
  primer
gtaaaacgacggccagtccttcaatatttgggagtaggc

SEQ ID NO: 111310 - DNA, 22 bp, Artificial Sequence
  primer
aagtgaaggagagggaggattt

SEQ ID NO: 111311 - DNA, 40 bp, Artificial Sequence
  primer
gtaaaacgacggccagtgcaaagatcaaatgaggtaatgg

SEQ ID NO: 111312 - DNA, 41 bp, Artificial Sequence
  primer
gtaaaacgacggccagtccaggtatctattgaatttcaggg

SEQ ID NO: 111313 - DNA, 23 bp, Artificial Sequence
  primer
gcacaaatctcctaaatttccaa

SEQ ID NO: 111314 - DNA, 38 bp, Artificial Sequence
  primer
gtaaaacgacggccagtctatgctttgtctgaggtcgg

SEQ ID NO: 111315 - DNA, 38 bp, Artificial Sequence
  primer
gtaaaacgacggccagttggccacagagagtgactgat

SEQ ID NO: 111316 - DNA, 21 bp, Artificial Sequence
  primer
aggtggaaggacagattgagg

SEQ ID NO: 111317 - DNA, 43 bp, Artificial Sequence
  primer
gtaaaacgacggccagtaacatgagtaactggaattgttcctc

SEQ ID NO: 111318 - DNA, 38 bp, Artificial Sequence
  primer
gtaaaacgacggccagttattccttcttgccctcttcc

SEQ ID NO: 111319 - DNA, 21 bp, Artificial Sequence
  primer
tgtaaatggttgaaggcgttg

SEQ ID NO: 111320 - DNA, 21 bp, Artificial Sequence
  primer
aaccagcgggaaagaaataac

SEQ ID NO: 111321 - DNA, 27 bp, Artificial Sequence
  primer
aaaggatacatttcaatcattcagttc

SEQ ID NO: 111322 - DNA, 24 bp, Artificial Sequence
  primer
tccttaataaacattcccagaagc

SEQ ID NO: 111323 - DNA, 43 bp, Artificial Sequence
  primer
gtaaaacgacggccagtaaccctaaatccgaggaatttatatc

SEQ ID NO: 111324 - DNA, 40 bp, Artificial Sequence
  primer
gtaaaacgacggccagtcacctgagtctttgaatgtttcc

SEQ ID NO: 111325 - DNA, 20 bp, Artificial Sequence
  primer
actgtccatcacatccaggc

SEQ ID NO: 111326 - DNA, 38 bp, Artificial Sequence
  primer
gtaaaacgacggccagtttagccattgggtgtttcaag

SEQ ID NO: 111327 - DNA, 23 bp, Artificial Sequence
  primer
ttcagtggagaatgtttagccag

SEQ ID NO: 111328 - DNA, 21 bp, Artificial Sequence
  primer
tggctttccaacttgtagctc

SEQ ID NO: 111329 - DNA, 38 bp, Artificial Sequence
  primer
gtaaaacgacggccagtggaccaatgaggagcagagtc

SEQ ID NO: 111330 - DNA, 24 bp, Artificial Sequence
  primer
ggtttcattgaactcattctcagc

SEQ ID NO: 111331 - DNA, 21 bp, Artificial Sequence
  primer
gtgatctgtccgtcttgcctc

SEQ ID NO: 111332 - DNA, 38 bp, Artificial Sequence
  primer
gtaaaacgacggccagtccgtgaccttgaaactgctta

SEQ ID NO: 111333 - DNA, 22 bp, Artificial Sequence
  primer
aaaccactctgatttccagtga

SEQ ID NO: 111334 - DNA, 38 bp, Artificial Sequence
  primer
gtaaaacgacggccagttttgcaacttgtaggcattgg

SEQ ID NO: 111335 - DNA, 38 bp, Artificial Sequence
  primer
gtaaaacgacggccagtttacttgggaggcagaagtgg

SEQ ID NO: 111336 - DNA, 21 bp, Artificial Sequence
  primer
gcctcaattgtcacacgagtc

SEQ ID NO: 111337 - DNA, 20 bp, Artificial Sequence
  primer
gacctacccacctcagcctc

SEQ ID NO: 111338 - DNA, 21 bp, Artificial Sequence
  primer
tcccatgtactgcctgaattg

SEQ ID NO: 111339 - DNA, 21 bp, Artificial Sequence
  primer
gcctcaagtgatcctcctgtc

SEQ ID NO: 111340 - DNA, 21 bp, Artificial Sequence
  primer
tgaggagcaaatgggataaag

SEQ ID NO: 111341 - DNA, 37 bp, Artificial Sequence
  primer
gtaaaacgacggccagtacatccatacgcctccactg

SEQ ID NO: 111342 - DNA, 36 bp, Artificial Sequence
  primer
gtaaaacgacggccagtatctgcccaccttggtgtc

SEQ ID NO: 111343 - DNA, 46 bp, Artificial Sequence
  primer
gtaaaacgacggccagtcactctaacctccaaatatgattattctc

SEQ ID NO: 111344 - DNA, 23 bp, Artificial Sequence
  primer
gggtaatttaaatctggagtccg

SEQ ID NO: 111345 - DNA, 38 bp, Artificial Sequence
  primer
gtaaaacgacggccagtgatgaatcacagcccacagac

SEQ ID NO: 111346 - DNA, 21 bp, Artificial Sequence
  primer
agtagctgggaccacaagagg

SEQ ID NO: 111347 - DNA, 39 bp, Artificial Sequence
  primer
gtaaaacgacggccagtgggagagaaacaagcacacatc

SEQ ID NO: 111348 - DNA, 38 bp, Artificial Sequence
  primer
gtaaaacgacggccagtaatgccctgctctttctatgg

SEQ ID NO: 111349 - DNA, 21 bp, Artificial Sequence
  primer
cctgcttatctttgcatgacc

SEQ ID NO: 111350 - DNA, 38 bp, Artificial Sequence
  primer
gtaaaacgacggccagtctataagtgcatgccacagcg

SEQ ID NO: 111351 - DNA, 38 bp, Artificial Sequence
  primer
gtaaaacgacggccagtaaggacatgggaactgcagag

SEQ ID NO: 111352 - DNA, 22 bp, Artificial Sequence
  primer
gaaatctaccttcttggctggg

SEQ ID NO: 111353 - DNA, 20 bp, Artificial Sequence
  primer
ttacaggcacccaccatcac

SEQ ID NO: 111354 - DNA, 21 bp, Artificial Sequence
  primer
caacaagagcgaaactccatc

SEQ ID NO: 111355 - DNA, 37 bp, Artificial Sequence
  primer
gtaaaacgacggccagtctgaccaatcctcccacctc

SEQ ID NO: 111356 - DNA, 20 bp, Artificial Sequence
  primer
acctgaccaaggacacatgg

SEQ ID NO: 111357 - DNA, 21 bp, Artificial Sequence
  primer
ctgttctgcacattgtcctgg

SEQ ID NO: 111358 - DNA, 20 bp, Artificial Sequence
  primer
tctggcccttgtgtcatttc

SEQ ID NO: 111359 - DNA, 20 bp, Artificial Sequence
  primer
ccagagagtcctccctcacc

SEQ ID NO: 111360 - DNA, 21 bp, Artificial Sequence
  primer
ttaacggccatgctaatctcc

SEQ ID NO: 111361 - DNA, 21 bp, Artificial Sequence
  primer
attcctgaacttggccacatc

SEQ ID NO: 111362 - DNA, 21 bp, Artificial Sequence
  primer
ccaaccactgaacttcctcag

SEQ ID NO: 111363 - DNA, 20 bp, Artificial Sequence
  primer
gggagagagagagaaagggc

SEQ ID NO: 111364 - DNA, 38 bp, Artificial Sequence
  primer
gtaaaacgacggccagtggtaaacactgggcagctgag

SEQ ID NO: 111365 - DNA, 22 bp, Artificial Sequence
  primer
tgccttctccctaattacaagc

SEQ ID NO: 111366 - DNA, 20 bp, Artificial Sequence
  primer
aagcctctgcacatgcaatc

SEQ ID NO: 111367 - DNA, 38 bp, Artificial Sequence
  primer
gtaaaacgacggccagtagctttggacttcagcctctg

SEQ ID NO: 111368 - DNA, 21 bp, Artificial Sequence
  primer
aaatctaccaaaccacgctgc

SEQ ID NO: 111369 - DNA, 37 bp, Artificial Sequence
  primer
gtaaaacgacggccagtgtgatggcttctaaggcagg

SEQ ID NO: 111370 - DNA, 38 bp, Artificial Sequence
  primer
gtaaaacgacggccagtagaaacccttgtcactctggc

SEQ ID NO: 111371 - DNA, 38 bp, Artificial Sequence
  primer
gtaaaacgacggccagttctaatcctggttcatgtggc

SEQ ID NO: 111372 - DNA, 44 bp, Artificial Sequence
  primer
gtaaaacgacggccagtttaaagtgacatgaatctctatcaagc

SEQ ID NO: 111373 - DNA, 22 bp, Artificial Sequence
  primer
gatacccagagtggtgtccttg

SEQ ID NO: 111374 - DNA, 21 bp, Artificial Sequence
  primer
agttacaggaaacagggaggc

SEQ ID NO: 111375 - DNA, 21 bp, Artificial Sequence
  primer
gaggtggttctgcagccatag

SEQ ID NO: 111376 - DNA, 38 bp, Artificial Sequence
  primer
gtaaaacgacggccagtcggacacctgactcctagagc

SEQ ID NO: 111377 - DNA, 18 bp, Artificial Sequence
  primer
gcaccgaggaccatccac

SEQ ID NO: 111378 - DNA, 21 bp, Artificial Sequence
  primer
tgcaatcagggagaggtacac

SEQ ID NO: 111379 - DNA, 41 bp, Artificial Sequence
  primer
gtaaaacgacggccagttgaaatcaacataatgagactggc

SEQ ID NO: 111380 - DNA, 39 bp, Artificial Sequence
  primer
gtaaaacgacggccagtccaacttggagacaagctgaac

SEQ ID NO: 111381 - DNA, 40 bp, Artificial Sequence
  primer
gtaaaacgacggccagtaatttcacaaaggtgagtcatgg

SEQ ID NO: 111382 - DNA, 38 bp, Artificial Sequence
  primer
gtaaaacgacggccagttccttcccttccattcaacac

SEQ ID NO: 111383 - DNA, 21 bp, Artificial Sequence
  primer
gctacccattgacacatggac

SEQ ID NO: 111384 - DNA, 39 bp, Artificial Sequence
  primer
gtaaaacgacggccagtttagaggagagggaagacccag

SEQ ID NO: 111385 - DNA, 38 bp, Artificial Sequence
  primer
gtaaaacgacggccagtttgtctttgcattgctttgtg

SEQ ID NO: 111386 - DNA, 22 bp, Artificial Sequence
  primer
tgccaacttccctcctaatttc

SEQ ID NO: 111387 - DNA, 21 bp, Artificial Sequence
  primer
aagcgcttgacacactctcac

SEQ ID NO: 111388 - DNA, 41 bp, Artificial Sequence
  primer
gtaaaacgacggccagtcatcgcactttatcaaatttaccc

SEQ ID NO: 111389 - DNA, 18 bp, Artificial Sequence
  primer
gccagctgatcggacaaa

SEQ ID NO: 111390 - DNA, 24 bp, Artificial Sequence
  primer
tgtgcaagttacatgtgaaacaaa

SEQ ID NO: 111391 - DNA, 21 bp, Artificial Sequence
  primer
taatccagatccactcccagc

SEQ ID NO: 111392 - DNA, 40 bp, Artificial Sequence
  primer
gtaaaacgacggccagtgcatacttgatgctgaagatgga

SEQ ID NO: 111393 - DNA, 40 bp, Artificial Sequence
  primer
gtaaaacgacggccagtctatttggatctcttccgttctg

SEQ ID NO: 111394 - DNA, 25 bp, Artificial Sequence
  primer
tgctttgtatgaataactctgagga

SEQ ID NO: 111395 - DNA, 21 bp, Artificial Sequence
  primer
gagcttccacgcttacaaatg

SEQ ID NO: 111396 - DNA, 21 bp, Artificial Sequence
  primer
cttaggtgcaaagacaagcgg

SEQ ID NO: 111397 - DNA, 38 bp, Artificial Sequence
  primer
gtaaaacgacggccagtatattgtggccttgagggaag

SEQ ID NO: 111398 - DNA, 23 bp, Artificial Sequence
  primer
tcatggattctatcaccgctatc

SEQ ID NO: 111399 - DNA, 42 bp, Artificial Sequence
  primer
gtaaaacgacggccagtttgggaataaatgtcttccacttac

SEQ ID NO: 111400 - DNA, 40 bp, Artificial Sequence
  primer
gtaaaacgacggccagtcaaggatgggtaatcttagcctg

SEQ ID NO: 111401 - DNA, 21 bp, Artificial Sequence
  primer
aaattccaagtggttagcacg

SEQ ID NO: 111402 - DNA, 43 bp, Artificial Sequence
  primer
gtaaaacgacggccagtccatataaagacagttattgtggctg

SEQ ID NO: 111403 - DNA, 39 bp, Artificial Sequence
  primer
gtaaaacgacggccagtgaggattgggtaggatgaggtc

SEQ ID NO: 111404 - DNA, 21 bp, Artificial Sequence
  primer
aatgccagttacctactgccc

SEQ ID NO: 111405 - DNA, 21 bp, Artificial Sequence
  primer
acccactacaaatcccagcag

SEQ ID NO: 111406 - DNA, 21 bp, Artificial Sequence
  primer
tgctaactgccctccaaattc

SEQ ID NO: 111407 - DNA, 21 bp, Artificial Sequence
  primer
gagaatgcatcactcaagggc

SEQ ID NO: 111408 - DNA, 43 bp, Artificial Sequence
  primer
gtaaaacgacggccagtcccatagttaatgcaatttcaacttc

SEQ ID NO: 111409 - DNA, 38 bp, Artificial Sequence
  primer
gtaaaacgacggccagtgggcttgcctatggtacactg

SEQ ID NO: 111410 - DNA, 38 bp, Artificial Sequence
  primer
gtaaaacgacggccagttatgcttaaagccctgcaatc

SEQ ID NO: 111411 - DNA, 38 bp, Artificial Sequence
  primer
gtaaaacgacggccagttcacttgttgcctcaggtttc

SEQ ID NO: 111412 - DNA, 38 bp, Artificial Sequence
  primer
gtaaaacgacggccagtgtgttagccagaacgcagttg

SEQ ID NO: 111413 - DNA, 38 bp, Artificial Sequence
  primer
gtaaaacgacggccagtccagagtaatccctgtacgcc

SEQ ID NO: 111414 - DNA, 21 bp, Artificial Sequence
  primer
gattctcaagtccaaccaggc

SEQ ID NO: 111415 - DNA, 39 bp, Artificial Sequence
  primer
gtaaaacgacggccagtccactgacccagaaatcatagc

SEQ ID NO: 111416 - DNA, 38 bp, Artificial Sequence
  primer
gtaaaacgacggccagtcctgtccgactgctaggtttg

SEQ ID NO: 111417 - DNA, 22 bp, Artificial Sequence
  primer
aggtaatacgtgaaggccaaac

SEQ ID NO: 111418 - DNA, 21 bp, Artificial Sequence
  primer
ctgtctgctcctacccagtcc

SEQ ID NO: 111419 - DNA, 21 bp, Artificial Sequence
  primer
actggcaaactgttggaaatg

SEQ ID NO: 111420 - DNA, 20 bp, Artificial Sequence
  primer
tccaggagcagctttctgtg

SEQ ID NO: 111421 - DNA, 21 bp, Artificial Sequence
  primer
gtttattcaggtgggcccttg

SEQ ID NO: 111422 - DNA, 38 bp, Artificial Sequence
  primer
gtaaaacgacggccagtacaaggtgcgggttgaagtag

SEQ ID NO: 111423 - DNA, 21 bp, Artificial Sequence
  primer
gtgacgagcctccagacctac

SEQ ID NO: 111424 - DNA, 21 bp, Artificial Sequence
  primer
ctacggcgtcggtataggaag

SEQ ID NO: 111425 - DNA, 37 bp, Artificial Sequence
  primer
gtaaaacgacggccagtagcgactgtgtccctctctg

SEQ ID NO: 111426 - DNA, 20 bp, Artificial Sequence
  primer
gggctgtaagagcacagcag

SEQ ID NO: 111427 - DNA, 20 bp, Artificial Sequence
  primer
tccaggagcagctttctgtg

SEQ ID NO: 111428 - DNA, 21 bp, Artificial Sequence
  primer
caggatcaggctatctctggc

SEQ ID NO: 111429 - DNA, 20 bp, Artificial Sequence
  primer
cgatttccacacctagcctg

SEQ ID NO: 111430 - DNA, 21 bp, Artificial Sequence
  primer
ggttctgcgcttgttgtaaag

SEQ ID NO: 111431 - DNA, 21 bp, Artificial Sequence
  primer
ggttctgcgcttgttgtaaag

SEQ ID NO: 111432 - DNA, 24 bp, Artificial Sequence
  primer
aagcaaatggtagatggcattaag

SEQ ID NO: 111433 - DNA, 38 bp, Artificial Sequence
  primer
gtaaaacgacggccagtttcattgttcttcccatcgtg

SEQ ID NO: 111434 - DNA, 38 bp, Artificial Sequence
  primer
gtaaaacgacggccagtaggtacaaaggatgctgccac

SEQ ID NO: 111435 - DNA, 38 bp, Artificial Sequence
  primer
gtaaaacgacggccagtttggacttgtctctggaggtg

SEQ ID NO: 111436 - DNA, 22 bp, Artificial Sequence
  primer
caatagaaagatggttctgggc

SEQ ID NO: 111437 - DNA, 19 bp, Artificial Sequence
  primer
ccttgagccggttcacttc

SEQ ID NO: 111438 - DNA, 38 bp, Artificial Sequence
  primer
gtaaaacgacggccagttgaaacacacaggtggaggac

SEQ ID NO: 111439 - DNA, 19 bp, Artificial Sequence
  primer
tagctgcatccacgtcctg

SEQ ID NO: 111440 - DNA, 21 bp, Artificial Sequence
  primer
actcacggatctcctgtaggg

SEQ ID NO: 111441 - DNA, 37 bp, Artificial Sequence
  primer
gtaaaacgacggccagtatggatggtaccacaggcag

SEQ ID NO: 111442 - DNA, 21 bp, Artificial Sequence
  primer
atctatgatgggcccaaggtc

SEQ ID NO: 111443 - DNA, 38 bp, Artificial Sequence
  primer
gtaaaacgacggccagtagtaatctcgagcctcctggg

SEQ ID NO: 111444 - DNA, 38 bp, Artificial Sequence
  primer
gtaaaacgacggccagtgactccaggtctgtccctagc

SEQ ID NO: 111445 - DNA, 21 bp, Artificial Sequence
  primer
tgtgctagccagagaatggag

SEQ ID NO: 111446 - DNA, 36 bp, Artificial Sequence
  primer
gtaaaacgacggccagtctgggatggaagaaggctg

SEQ ID NO: 111447 - DNA, 38 bp, Artificial Sequence
  primer
gtaaaacgacggccagtgtgctgaaagatctgcctctg

SEQ ID NO: 111448 - DNA, 38 bp, Artificial Sequence
  primer
gtaaaacgacggccagtttggacaggatttctccttcg

SEQ ID NO: 111449 - DNA, 21 bp, Artificial Sequence
  primer
tacagcccttggttgtgtgac

SEQ ID NO: 111450 - DNA, 38 bp, Artificial Sequence
  primer
gtaaaacgacggccagttgcactaccatcctgttctgc

SEQ ID NO: 111451 - DNA, 38 bp, Artificial Sequence
  primer
gtaaaacgacggccagtatggatctgtgactcgcagtg

SEQ ID NO: 111452 - DNA, 38 bp, Artificial Sequence
  primer
gtaaaacgacggccagtaccttgtagcatttgggcttc

SEQ ID NO: 111453 - DNA, 41 bp, Artificial Sequence
  primer
gtaaaacgacggccagtggacagacagaataagaggtttcc

SEQ ID NO: 111454 - DNA, 40 bp, Artificial Sequence
  primer
gtaaaacgacggccagtcgagtcacagtcacaatcaaatg

SEQ ID NO: 111455 - DNA, 38 bp, Artificial Sequence
  primer
gtaaaacgacggccagttttgctttggagtccactgag

SEQ ID NO: 111456 - DNA, 20 bp, Artificial Sequence
  primer
cagagagggcacttacaggc

SEQ ID NO: 111457 - DNA, 22 bp, Artificial Sequence
  primer
tcagagccttccattagtgagg

SEQ ID NO: 111458 - DNA, 18 bp, Artificial Sequence
  primer
aacctgcaccttcccgtc

SEQ ID NO: 111459 - DNA, 18 bp, Artificial Sequence
  primer
gtgagggtgcagagggtg

SEQ ID NO: 111460 - DNA, 37 bp, Artificial Sequence
  primer
gtaaaacgacggccagtaggagagttcgaggctggac

SEQ ID NO: 111461 - DNA, 20 bp, Artificial Sequence
  primer
ctgggccctgttcctacttg

SEQ ID NO: 111462 - DNA, 37 bp, Artificial Sequence
  primer
gtaaaacgacggccagtaccaaccagatgcaggagtg

SEQ ID NO: 111463 - DNA, 21 bp, Artificial Sequence
  primer
gattaattacgctcaagcgcc

SEQ ID NO: 111464 - DNA, 20 bp, Artificial Sequence
  primer
caaatggcaattgtctgtgc

SEQ ID NO: 111465 - DNA, 21 bp, Artificial Sequence
  primer
tgctatggcaagtatggaagc

SEQ ID NO: 111466 - DNA, 39 bp, Artificial Sequence
  primer
gtaaaacgacggccagtcacaaatagtgtcctcccaagg

SEQ ID NO: 111467 - DNA, 38 bp, Artificial Sequence
  primer
gtaaaacgacggccagtgcaaactggcagctaggattc

SEQ ID NO: 111468 - DNA, 38 bp, Artificial Sequence
  primer
gtaaaacgacggccagtgtcaaatgatgaggctgaggg

SEQ ID NO: 111469 - DNA, 38 bp, Artificial Sequence; identical to SEQ ID NO: 111467
  primer

SEQ ID NO: 111470 - DNA, 18 bp, Artificial Sequence
  primer
tctgaagccacgctcagg

SEQ ID NO: 111471 - DNA, 21 bp, Artificial Sequence
  primer
ccttgagacccgagagttcac

SEQ ID NO: 111472 - DNA, 21 bp, Artificial Sequence
  primer
tggaatccaacttcttctggc

SEQ ID NO: 111473 - DNA, 21 bp, Artificial Sequence
  primer
actacccatcgtgaggaccac

SEQ ID NO: 111474 - DNA, 21 bp, Artificial Sequence
  primer
gggctgtacctcttcacaagg

SEQ ID NO: 111475 - DNA, 37 bp, Artificial Sequence
  primer
gtaaaacgacggccagtgaaacccaaggaggcaacac

SEQ ID NO: 111476 - DNA, 21 bp, Artificial Sequence
  primer
caggagctactggagtgacca

SEQ ID NO: 111477 - DNA, 18 bp, Artificial Sequence
  primer
caatgggccaagatcacg

SEQ ID NO: 111478 - DNA, 21 bp, Artificial Sequence
  primer
cagagatcaaatctgtcgccc

SEQ ID NO: 111479 - DNA, 23 bp, Artificial Sequence
  primer
tcctgactaatgaagacaccacc

SEQ ID NO: 111480 - DNA, 21 bp, Artificial Sequence
  primer
tcttcccacagtctccaaagc

SEQ ID NO: 111481 - DNA, 20 bp, Artificial Sequence
  primer
actgatgctgaaggccacac

SEQ ID NO: 111482 - DNA, 21 bp, Artificial Sequence
  primer
aacacaattccatcctgcctc

SEQ ID NO: 111483 - DNA, 21 bp, Artificial Sequence
  primer
ctccctgtaccagaagggaag

SEQ ID NO: 111484 - DNA, 38 bp, Artificial Sequence
  primer
gtaaaacgacggccagttcctctgggtctcagtcttcc

SEQ ID NO: 111485 - DNA, 38 bp, Artificial Sequence
  primer
gtaaaacgacggccagttcaggtcattcatcatgcaaa

SEQ ID NO: 111486 - DNA, 21 bp, Artificial Sequence
  primer
cgtgtattggtcgaagagcag

SEQ ID NO: 111487 - DNA, 21 bp, Artificial Sequence
  primer
cccagactctctccaaaccac

SEQ ID NO: 111488 - DNA, 39 bp, Artificial Sequence
  primer
gtaaaacgacggccagtcatctaaggacacacagcatgg

SEQ ID NO: 111489 - DNA, 38 bp, Artificial Sequence
  primer
gtaaaacgacggccagtacagaaccagcctcttcttgc

SEQ ID NO: 111490 - DNA, 21 bp, Artificial Sequence
  primer
ctcaaggtggagtgctgattg

SEQ ID NO: 111491 - DNA, 37 bp, Artificial Sequence
  primer
gtaaaacgacggccagtggatgggaggcagctatcac

SEQ ID NO: 111492 - DNA, 38 bp, Artificial Sequence
  primer
gtaaaacgacggccagtagtgcccagaacctagcagtc

SEQ ID NO: 111493 - DNA, 21 bp, Artificial Sequence
  primer
tctctgcccagtgttcagttc

SEQ ID NO: 111494 - DNA, 37 bp, Artificial Sequence
  primer
gtaaaacgacggccagttggtctcactccaaagccag

SEQ ID NO: 111495 - DNA, 22 bp, Artificial Sequence
  primer
gacctgtagctgggtgtgagag

SEQ ID NO: 111496 - DNA, 38 bp, Artificial Sequence
  primer
gtaaaacgacggccagtccatgacaaagtgctggtttg

SEQ ID NO: 111497 - DNA, 38 bp, Artificial Sequence
  primer
gtaaaacgacggccagtcctcaacaagtagctggtccc

SEQ ID NO: 111498 - DNA, 38 bp, Artificial Sequence
  primer
gtaaaacgacggccagtggagctcactacctccctttg

SEQ ID NO: 111499 - DNA, 21 bp, Artificial Sequence
  primer
gacataagcctaggtctgccc

SEQ ID NO: 111500 - DNA, 21 bp, Artificial Sequence
  primer
aaggagcttgatgaagccaac

SEQ ID NO: 111501 - DNA, 38 bp, Artificial Sequence
  primer
gtaaaacgacggccagtactcatcagtacccaccagcc

SEQ ID NO: 111502 - DNA, 38 bp, Artificial Sequence
  primer
gtaaaacgacggccagtgggtagagcacttgatctggg

SEQ ID NO: 111503 - DNA, 38 bp, Artificial Sequence
  primer
gtaaaacgacggccagtgaaacagcactcaggatgagg

SEQ ID NO: 111504 - DNA, 21 bp, Artificial Sequence
  primer
ggtgggttaaggcctgagttc

SEQ ID NO: 111505 - DNA, 38 bp, Artificial Sequence
  primer
gtaaaacgacggccagtgtctgaagcaggttgcatctc

SEQ ID NO: 111506 - DNA, 20 bp, Artificial Sequence
  primer
ggtctgggtcctgtcttcag

SEQ ID NO: 111507 - DNA, 38 bp, Artificial Sequence
  primer
gtaaaacgacggccagtggaatcccgtctctactgctg

SEQ ID NO: 111508 - DNA, 21 bp, Artificial Sequence
  primer
acagacacccatgacacttcc

SEQ ID NO: 111509 - DNA, 21 bp, Artificial Sequence
  primer
agggcactcatggaactcaag

SEQ ID NO: 111510 - DNA, 21 bp, Artificial Sequence
  primer
atggctctgctagagaggtgg

SEQ ID NO: 111511 - DNA, 38 bp, Artificial Sequence
  primer
gtaaaacgacggccagtgggtgtccaaagtttcctagc

SEQ ID NO: 111512 - DNA, 21 bp, Artificial Sequence
  primer
gttcaatgccaggcagcttag

SEQ ID NO: 111513 - DNA, 38 bp, Artificial Sequence
  primer
gtaaaacgacggccagtctcagaaggactggatgaccc

SEQ ID NO: 111514 - DNA, 21 bp, Artificial Sequence
  primer
cctaccttgggcctgactctc

SEQ ID NO: 111515 - DNA, 38 bp, Artificial Sequence
  primer
gtaaaacgacggccagttaaggaccctgtggcaagaag

SEQ ID NO: 111516 - DNA, 38 bp, Artificial Sequence
  primer
gtaaaacgacggccagttttgaccattgaacatcctgc

SEQ ID NO: 111517 - DNA, 38 bp, Artificial Sequence
  primer
gtaaaacgacggccagtgacaggctaaagggctgtctg

SEQ ID NO: 111518 - DNA, 38 bp, Artificial Sequence
  primer
gtaaaacgacggccagttcaagaggctcaatgtggatg

SEQ ID NO: 111519 - DNA, 21 bp, Artificial Sequence
  primer
ctaacatcaggcaggtgagcc

SEQ ID NO: 111520 - DNA, 21 bp, Artificial Sequence
  primer
ttcctcctctctctgtggatg

SEQ ID NO: 111521 - DNA, 21 bp, Artificial Sequence
  primer
tgagcagagtcagagctgagg

SEQ ID NO: 111522 - DNA, 40 bp, Artificial Sequence
  primer
gtaaaacgacggccagtccataaggaggactggtcaaatc

SEQ ID NO: 111523 - DNA, 20 bp, Artificial Sequence
  primer
tttggaaccctcctcatctg

SEQ ID NO: 111524 - DNA, 21 bp, Artificial Sequence
  primer
gagacctctgtccctgctgag

SEQ ID NO: 111525 - DNA, 21 bp, Artificial Sequence
  primer
ttgctttgcattatgactcgg

SEQ ID NO: 111526 - DNA, 24 bp, Artificial Sequence
  primer
ttggacagaaactaatgcttagcc

SEQ ID NO: 111527 - DNA, 37 bp, Artificial Sequence
  primer
gtaaaacgacggccagtgagggcaccattctggagag

SEQ ID NO: 111528 - DNA, 38 bp, Artificial Sequence
  primer
gtaaaacgacggccagtatcccagatgtgagttgggtc

SEQ ID NO: 111529 - DNA, 38 bp, Artificial Sequence
  primer
gtaaaacgacggccagttacgatctttccctctcctgg

SEQ ID NO: 111530 - DNA, 21 bp, Artificial Sequence
  primer
acgaggagacggagtgtcaac

SEQ ID NO: 111531 - DNA, 21 bp, Artificial Sequence
  primer
gtggctggagtcacatctagg

SEQ ID NO: 111532 - DNA, 38 bp, Artificial Sequence
  primer
gtaaaacgacggccagtgctgctatttacgcaagaccc

SEQ ID NO: 111533 - DNA, 38 bp, Artificial Sequence
  primer
gtaaaacgacggccagtaagtgatggtcagagatgccc

SEQ ID NO: 111534 - DNA, 21 bp, Artificial Sequence
  primer
tgacctcacacagacctgtcc

SEQ ID NO: 111535 - DNA, 21 bp, Artificial Sequence
  primer
ccaagctcaaagagatgggag

SEQ ID NO: 111536 - DNA, 38 bp, Artificial Sequence
  primer
gtaaaacgacggccagtagggccttgtacagacaggag

SEQ ID NO: 111537 - DNA, 21 bp, Artificial Sequence
  primer
ccttggtgtctcagcccttac

SEQ ID NO: 111538 - DNA, 38 bp, Artificial Sequence
  primer
gtaaaacgacggccagtgccatgctctggatagaggag

SEQ ID NO: 111539 - DNA, 37 bp, Artificial Sequence
  primer
gtaaaacgacggccagtagaaggctggagtcctctgc

SEQ ID NO: 111540 - DNA, 19 bp, Artificial Sequence
  primer
caggtaagctccagcaggc

SEQ ID NO: 111541 - DNA, 20 bp, Artificial Sequence
  primer
agacagcacacacctccacc

SEQ ID NO: 111542 - DNA, 37 bp, Artificial Sequence
  primer
gtaaaacgacggccagtaagggctgctttgagaaacc

SEQ ID NO: 111543 - DNA, 22 bp, Artificial Sequence
  primer
cagctgtgctccaggagtttac

SEQ ID NO: 111544 - DNA, 37 bp, Artificial Sequence
  primer
gtaaaacgacggccagtcaggcagcactgggtaagag

SEQ ID NO: 111545 - DNA, 21 bp, Artificial Sequence
  primer
gcaacactgcaaatcaggttc

SEQ ID NO: 111546 - DNA, 38 bp, Artificial Sequence
  primer
gtaaaacgacggccagtagtcctcaccactgaggaagc

SEQ ID NO: 111547 - DNA, 20 bp, Artificial Sequence
  primer
acatgtggccttcaaacctg

SEQ ID NO: 111548 - DNA, 38 bp, Artificial Sequence
  primer
gtaaaacgacggccagtacaaagccggaaagaagtgag

SEQ ID NO: 111549 - DNA, 21 bp, Artificial Sequence
  primer
ctctatgtacacacgcgagcc

SEQ ID NO: 111550 - DNA, 19 bp, Artificial Sequence
  primer
gtcgctcagcgtggtgtag

SEQ ID NO: 111551 - DNA, 21 bp, Artificial Sequence
  primer
agctgcacagataccaagagc

SEQ ID NO: 111552 - DNA, 21 bp, Artificial Sequence
  primer
ctcactaggcctccagtgtcc

SEQ ID NO: 111553 - DNA, 21 bp, Artificial Sequence
  primer
gcctcaatccttccacttcac

SEQ ID NO: 111554 - DNA, 21 bp, Artificial Sequence
  primer
gacagcaagtcccagatgaag

SEQ ID NO: 111555 - DNA, 19 bp, Artificial Sequence
  primer
gtgtaggacaggcgctgct

SEQ ID NO: 111556 - DNA, 38 bp, Artificial Sequence
  primer
gtaaaacgacggccagttgcacagataccaagagctgc

SEQ ID NO: 111557 - DNA, 21 bp, Artificial Sequence
  primer
cttggtatccgcaaagaggag

SEQ ID NO: 111558 - DNA, 38 bp, Artificial Sequence
  primer
gtaaaacgacggccagtctcaccctcctgtagggaatg

SEQ ID NO: 111559 - DNA, 37 bp, Artificial Sequence
  primer
gtaaaacgacggccagtctcactctctgcctggtcct

SEQ ID NO: 111560 - DNA, 21 bp, Artificial Sequence
  primer
cagttcgggtctatgaggagg

SEQ ID NO: 111561 - DNA, 38 bp, Artificial Sequence
  primer
gtaaaacgacggccagtcgagcactgcatactccactc

SEQ ID NO: 111562 - DNA, 38 bp, Artificial Sequence
  primer
gtaaaacgacggccagtctgccaacatacctcgtaggg

SEQ ID NO: 111563 - DNA, 21 bp, Artificial Sequence
  primer
ctgccaacatacctcgtaggg

SEQ ID NO: 111564 - DNA, 21 bp, Artificial Sequence
  primer
ggcaccagagctctctcaaag

SEQ ID NO: 111565 - DNA, 21 bp, Artificial Sequence
  primer
aaactctgatgcctttcaccg

SEQ ID NO: 111566 - DNA, 25 bp, Artificial Sequence
  primer
ggaactatgaacaattatggccttc

SEQ ID NO: 111567 - DNA, 38 bp, Artificial Sequence
  primer
gtaaaacgacggccagtaacatgccctcaacacatcac

SEQ ID NO: 111568 - DNA, 20 bp, Artificial Sequence
  primer
acgctgctctctacccttcc

SEQ ID NO: 111569 - DNA, 37 bp, Artificial Sequence
  primer
gtaaaacgacggccagtcccacttgtcaccactgctc

SEQ ID NO: 111570 - DNA, 21 bp, Artificial Sequence
  primer
cagctcacactaacagggcag

SEQ ID NO: 111571 - DNA, 20 bp, Artificial Sequence
  primer
ctctgccttgggacaaacag

SEQ ID NO: 111572 - DNA, 20 bp, Artificial Sequence
  primer
aacagctgagaccaagccac

SEQ ID NO: 111573 - DNA, 21 bp, Artificial Sequence
  primer
aggagatgtagctgggacgac

SEQ ID NO: 111574 - DNA, 38 bp, Artificial Sequence
  primer
gtaaaacgacggccagttcacacatgtcgaagctcaaa

SEQ ID NO: 111575 - DNA, 21 bp, Artificial Sequence
  primer
ctaaagcctccaccctaaggc

SEQ ID NO: 111576 - DNA, 21 bp, Artificial Sequence
  primer
atctcccactcctcccatttc

SEQ ID NO: 111577 - DNA, 38 bp, Artificial Sequence
  primer
gtaaaacgacggccagtgagaagcatctgaggcaggag

SEQ ID NO: 111578 - DNA, 21 bp, Artificial Sequence
  primer
aacctgcacaacgtgtgactc

SEQ ID NO: 111579 - DNA, 39 bp, Artificial Sequence
  primer
gtaaaacgacggccagttcctgaaggaataagggaaagg

SEQ ID NO: 111580 - DNA, 38 bp, Artificial Sequence
  primer
gtaaaacgacggccagttaagaccctggaagagttggg

SEQ ID NO: 111581 - DNA, 21 bp, Artificial Sequence
  primer
gcctcttaggatatccagccc

SEQ ID NO: 111582 - DNA, 21 bp, Artificial Sequence
  primer
atgctagggagtgtcaaagcc

SEQ ID NO: 111583 - DNA, 21 bp, Artificial Sequence
  primer
aagaagtgatgtggctttccc

SEQ ID NO: 111584 - DNA, 21 bp, Artificial Sequence
  primer
acacatgtgattggaccttgg

SEQ ID NO: 111585 - DNA, 38 bp, Artificial Sequence
  primer
gtaaaacgacggccagttgtgcctgtaaaggaggtgtg

SEQ ID NO: 111586 - DNA, 38 bp, Artificial Sequence
  primer
gtaaaacgacggccagtgctgtattgtgcatgaatccc

SEQ ID NO: 111587 - DNA, 38 bp, Artificial Sequence
  primer
gtaaaacgacggccagttctggagagtgagcatcaacc

SEQ ID NO: 111588 - DNA, 21 bp, Artificial Sequence
  primer
gaacttccagagcaccctgtg

SEQ ID NO: 111589 - DNA, 38 bp, Artificial Sequence
  primer
gtaaaacgacggccagtctcccaatctgcactctttcc

SEQ ID NO: 111590 - DNA, 38 bp, Artificial Sequence
  primer
gtaaaacgacggccagtatcgagccagatcatttccag

SEQ ID NO: 111591 - DNA, 38 bp, Artificial Sequence
  primer
gtaaaacgacggccagtttgtatccacctgtctgtgcc

SEQ ID NO: 111592 - DNA, 20 bp, Artificial Sequence
  primer
cttcccttgcaactcagcac

SEQ ID NO: 111593 - DNA, 38 bp, Artificial Sequence
  primer
gtaaaacgacggccagtgacctcctagaggtgccactg

SEQ ID NO: 111594 - DNA, 21 bp, Artificial Sequence
  primer
gtgcaaggaatggaaataggg

SEQ ID NO: 111595 - DNA, 21 bp, Artificial Sequence
  primer
ccaaccacttccagtctcttg

SEQ ID NO: 111596 - DNA, 21 bp, Artificial Sequence
  primer
gtggtgctataggaggccaag

SEQ ID NO: 111597 - DNA, 21 bp, Artificial Sequence
  primer
taggatgaatgatgtgcaggg

SEQ ID NO: 111598 - DNA, 21 bp, Artificial Sequence
  primer
gtgagggtgaaggaacactcc

SEQ ID NO: 111599 - DNA, 23 bp, Artificial Sequence
  primer
ccaagcctaattgtgcacctaac

SEQ ID NO: 111600 - DNA, 22 bp, Artificial Sequence
  primer
tggtaaatggtttatggtgtgc

SEQ ID NO: 111601 - DNA, 21 bp, Artificial Sequence
  primer
aaggcacgaaatcctttgatg

SEQ ID NO: 111602 - DNA, 42 bp, Artificial Sequence
  primer
gtaaaacgacggccagttttatgcaaatcatcattcatcttt

SEQ ID NO: 111603 - DNA, 38 bp, Artificial Sequence
  primer
gtaaaacgacggccagttgatcctcagcaggaggaaat

SEQ ID NO: 111604 - DNA, 22 bp, Artificial Sequence
  primer
tttcctcagatcactctctcgc

SEQ ID NO: 111605 - DNA, 39 bp, Artificial Sequence
  primer
gtaaaacgacggccagtgagggagagaaacagaaaggga

SEQ ID NO: 111606 - DNA, 19 bp, Artificial Sequence
  primer
ctgtcaaattgcaccgtgg

SEQ ID NO: 111607 - DNA, 22 bp, Artificial Sequence
  primer
aatccctgaagaaatgggaaac

SEQ ID NO: 111608 - DNA, 21 bp, Artificial Sequence
  primer
ccttcaacccagtaatggtgc

SEQ ID NO: 111609 - DNA, 22 bp, Artificial Sequence
  primer
tttgcaaacaagctgaaatgag

SEQ ID NO: 111610 - DNA, 21 bp, Artificial Sequence
  primer
agcgtcatttcaagcatatcg

SEQ ID NO: 111611 - DNA, 22 bp, Artificial Sequence
  primer
ggtattcgaatgtcactgagcc

SEQ ID NO: 111612 - DNA, 24 bp, Artificial Sequence
  primer
tcaatcaaccgtaagactgacatc

SEQ ID NO: 111613 - DNA, 24 bp, Artificial Sequence
  primer
gggtagagagaattcaaacacctg

SEQ ID NO: 111614 - DNA, 40 bp, Artificial Sequence
  primer
gtaaaacgacggccagttgctgctgtgttcaaataacatt

SEQ ID NO: 111615 - DNA, 24 bp, Artificial Sequence
  primer
gtttggaaacttgacctcctttag

SEQ ID NO: 111616 - DNA, 40 bp, Artificial Sequence
  primer
gtaaaacgacggccagtctctgacttcaaattggtaagcg

SEQ ID NO: 111617 - DNA, 38 bp, Artificial Sequence
  primer
gtaaaacgacggccagtacacacacacacacacacacg

SEQ ID NO: 111618 - DNA, 21 bp, Artificial Sequence
  primer
tgggctccaatgcaaatatac

SEQ ID NO: 111619 - DNA, 44 bp, Artificial Sequence
  primer
gtaaaacgacggccagtaaattattatagtgcaacggaagactc

SEQ ID NO: 111620 - DNA, 40 bp, Artificial Sequence
  primer
gtaaaacgacggccagtggagcccaaagaagacaatgtta

SEQ ID NO: 111621 - DNA, 23 bp, Artificial Sequence
  primer
agtggctctgacacacacataac

SEQ ID NO: 111622 - DNA, 39 bp, Artificial Sequence
  primer
gtaaaacgacggccagtaaatggttcaaagatttccagc

SEQ ID NO: 111623 - DNA, 23 bp, Artificial Sequence
  primer
agtggctctgacacacacataac

SEQ ID NO: 111624 - DNA, 21 bp, Artificial Sequence
  primer
cctgacagcgtggagtgttac

SEQ ID NO: 111625 - DNA, 21 bp, Artificial Sequence
  primer
accagcaatcattccaatcag

SEQ ID NO: 111626 - DNA, 38 bp, Artificial Sequence
  primer
gtaaaacgacggccagttgggagacactcagacagcag

SEQ ID NO: 111627 - DNA, 38 bp, Artificial Sequence
  primer
gtaaaacgacggccagtactgaccacatgggtgacaac

SEQ ID NO: 111628 - DNA, 38 bp, Artificial Sequence
  primer
gtaaaacgacggccagtataatttccactgtgccaccc

SEQ ID NO: 111629 - DNA, 23 bp, Artificial Sequence
  primer
gcctctgggattaatttaccagg

SEQ ID NO: 111630 - DNA, 38 bp, Artificial Sequence
  primer
gtaaaacgacggccagtagctggagaagagaaagtgcg

SEQ ID NO: 111631 - DNA, 21 bp, Artificial Sequence
  primer
attaagagtgggcacctctgc

SEQ ID NO: 111632 - DNA, 21 bp, Artificial Sequence
  primer
tgagactgcatgatttccctc

SEQ ID NO: 111633 - DNA, 23 bp, Artificial Sequence
  primer
ggttaagaacacctggtcaaagg

SEQ ID NO: 111634 - DNA, 37 bp, Artificial Sequence
  primer
gtaaaacgacggccagtatcctctcagccatgggttc

SEQ ID NO: 111635 - DNA, 21 bp, Artificial Sequence
  primer
cttcaccgtctcacagagcac

SEQ ID NO: 111636 - DNA, 38 bp, Artificial Sequence
  primer
gtaaaacgacggccagtaccaagaacctggacaacctg

SEQ ID NO: 111637 - DNA, 21 bp, Artificial Sequence
  primer
tctgtcatctccgtgttcagg

SEQ ID NO: 111638 - DNA, 38 bp, Artificial Sequence
  primer
gtaaaacgacggccagtatgtaaccaagtggccaaagc

SEQ ID NO: 111639 - DNA, 38 bp, Artificial Sequence
  primer
gtaaaacgacggccagtcatctctttcagtttgacggg

SEQ ID NO: 111640 - DNA, 22 bp, Artificial Sequence
  primer
ttccttatcagctaccaccagc

SEQ ID NO: 111641 - DNA, 20 bp, Artificial Sequence
  primer
cttctgacaaggcgatctgg

SEQ ID NO: 111642 - DNA, 21 bp, Artificial Sequence
  primer
cttctctaccagcttcccacc

SEQ ID NO: 111643 - DNA, 21 bp, Artificial Sequence
  primer
agccctctagacgatgagctg

SEQ ID NO: 111644 - DNA, 38 bp, Artificial Sequence
  primer
gtaaaacgacggccagtcatagcacaaggaaagggctc

SEQ ID NO: 111645 - DNA, 21 bp, Artificial Sequence
  primer
gactgcgacagacactatggg

SEQ ID NO: 111646 - DNA, 37 bp, Artificial Sequence
  primer
gtaaaacgacggccagtccctcatgggtaatgcagac

SEQ ID NO: 111647 - DNA, 20 bp, Artificial Sequence
  primer
tcaccatttccaggacgaag

SEQ ID NO: 111648 - DNA, 21 bp, Artificial Sequence
  primer
tctggactaaagtgtgctgcc

SEQ ID NO: 111649 - DNA, 38 bp, Artificial Sequence
  primer
gtaaaacgacggccagtagcccagaactccttcctacc

SEQ ID NO: 111650 - DNA, 21 bp, Artificial Sequence
  primer
ttacagcacagggaccaagag

SEQ ID NO: 111651 - DNA, 21 bp, Artificial Sequence
  primer
tgagaagaatcgtgatgctgg

SEQ ID NO: 111652 - DNA, 21 bp, Artificial Sequence
  primer
gtcacggaggctttctgtagc

SEQ ID NO: 111653 - DNA, 20 bp, Artificial Sequence
  primer
agtaggtgggctggctgaac

SEQ ID NO: 111654 - DNA, 21 bp, Artificial Sequence
  primer
aagcaggcctctacaccactc

SEQ ID NO: 111655 - DNA, 39 bp, Artificial Sequence
  primer
gtaaaacgacggccagttcctggcaccaattcttcttac

SEQ ID NO: 111656 - DNA, 39 bp, Artificial Sequence
  primer
gtaaaacgacggccagtccacaagagtgcctgtttatcc

SEQ ID NO: 111657 - DNA, 21 bp, Artificial Sequence
  primer
ctttgtaggctgaggtgggag

SEQ ID NO: 111658 - DNA, 41 bp, Artificial Sequence
  primer
gtaaaacgacggccagttggcacatttcatctacacaagtc

SEQ ID NO: 111659 - DNA, 22 bp, Artificial Sequence
  primer
cagtccagcttgtgaggtaagc

SEQ ID NO: 111660 - DNA, 19 bp, Artificial Sequence
  primer
gcctggcctgataaagcac

SEQ ID NO: 111661 - DNA, 22 bp, Artificial Sequence
  primer
tgcctggcacacaaataaatac

SEQ ID NO: 111662 - DNA, 37 bp, Artificial Sequence
  primer
gtaaaacgacggccagtacgacttccagcagaccatc

SEQ ID NO: 111663 - DNA, 38 bp, Artificial Sequence
  primer
gtaaaacgacggccagtggatcttgagccatgtttctg

SEQ ID NO: 111664 - DNA, 38 bp, Artificial Sequence
  primer
gtaaaacgacggccagtaaataactgaaggctggctgg

SEQ ID NO: 111665 - DNA, 21 bp, Artificial Sequence
  primer
caggcctgacatcattctttg

SEQ ID NO: 111666 - DNA, 20 bp, Artificial Sequence
  primer
atgccaggtagcacaaatgg

SEQ ID NO: 111667 - DNA, 38 bp, Artificial Sequence
  primer
gtaaaacgacggccagttaggaatgcagtctgtggctg

SEQ ID NO: 111668 - DNA, 38 bp, Artificial Sequence
  primer
gtaaaacgacggccagtacattcaaatgacaggagccc

SEQ ID NO: 111669 - DNA, 22 bp, Artificial Sequence
  primer
cgcatatccgtgatatcaactc

SEQ ID NO: 111670 - DNA, 21 bp, Artificial Sequence
  primer
tcctagtcggatttcctcagc

SEQ ID NO: 111671 - DNA, 22 bp, Artificial Sequence
  primer
ggtaaagtgcaggactccaaag

SEQ ID NO: 111672 - DNA, 20 bp, Artificial Sequence
  primer
gtctggagcagaagccaaag

SEQ ID NO: 111673 - DNA, 21 bp, Artificial Sequence
  primer
gttgggacaatatgggtggtc

SEQ ID NO: 111674 - DNA, 38 bp, Artificial Sequence
  primer
gtaaaacgacggccagtctcaaggcagagaagggactg

SEQ ID NO: 111675 - DNA, 21 bp, Artificial Sequence
  primer
tggtaattcactggagcatcg

SEQ ID NO: 111676 - DNA, 38 bp, Artificial Sequence
  primer
gtaaaacgacggccagttgggaaggatgtgaatgtctg

SEQ ID NO: 111677 - DNA, 20 bp, Artificial Sequence
  primer
gaaggcaaatgctgagatgc

SEQ ID NO: 111678 - DNA, 21 bp, Artificial Sequence
  primer
gggacattaagtcacttgggc

SEQ ID NO: 111679 - DNA, 38 bp, Artificial Sequence
  primer
gtaaaacgacggccagtttcctgggcatcctgagtatc

SEQ ID NO: 111680 - DNA, 21 bp, Artificial Sequence
  primer
ggagggaatcattcgattgtc

SEQ ID NO: 111681 - DNA, 39 bp, Artificial Sequence
  primer
gtaaaacgacggccagtttgagtattatgctgcggaatg

SEQ ID NO: 111682 - DNA, 21 bp, Artificial Sequence
  primer
agacactagggacccagaggg

SEQ ID NO: 111683 - DNA, 21 bp, Artificial Sequence
  primer
tgggagaggacaggcagttag

SEQ ID NO: 111684 - DNA, 39 bp, Artificial Sequence
  primer
gtaaaacgacggccagtggatacatcctgtgcatgtgtg

SEQ ID NO: 111685 - DNA, 38 bp, Artificial Sequence
  primer
gtaaaacgacggccagtatatccgcagagcatggagtc

SEQ ID NO: 111686 - DNA, 21 bp, Artificial Sequence
  primer
ccaaagatggcttctcagttg

SEQ ID NO: 111687 - DNA, 21 bp, Artificial Sequence
  primer
tgccaggtaaatgagtggatg

SEQ ID NO: 111688 - DNA, 22 bp, Artificial Sequence
  primer
gctttgcttccactggttagag

SEQ ID NO: 111689 - DNA, 38 bp, Artificial Sequence
  primer
gtaaaacgacggccagtcaagaacagccacttgcttcc

SEQ ID NO: 111690 - DNA, 18 bp, Artificial Sequence
  primer
tcaccgtctcaccatccc

SEQ ID NO: 111691 - DNA, 38 bp, Artificial Sequence
  primer
gtaaaacgacggccagtgctacagtgcgcttccaagac

SEQ ID NO: 111692 - DNA, 37 bp, Artificial Sequence
  primer
gtaaaacgacggccagtacagggcattctgtacacgc

SEQ ID NO: 111693 - DNA, 42 bp, Artificial Sequence
  primer
gtaaaacgacggccagtacacatacttatgtttgcacggtag

SEQ ID NO: 111694 - DNA, 23 bp, Artificial Sequence
  primer
ccaagctagtcctatgtgtggag

SEQ ID NO: 111695 - DNA, 37 bp, Artificial Sequence
  primer
gtaaaacgacggccagtcacaacggccacttctaagc

SEQ ID NO: 111696 - DNA, 21 bp, Artificial Sequence
  primer
tgagatgcgtatgctaccagg

SEQ ID NO: 111697 - DNA, 23 bp, Artificial Sequence
  primer
tcgccaatgttaacagctattct

SEQ ID NO: 111698 - DNA, 39 bp, Artificial Sequence
  primer
gtaaaacgacggccagtgagggagggatctagaggaatc

SEQ ID NO: 111699 - DNA, 38 bp, Artificial Sequence
  primer
gtaaaacgacggccagtctgcatttctgcacctctctg

SEQ ID NO: 111700 - DNA, 21 bp, Artificial Sequence
  primer
acaagatcaggaaggctctgc

SEQ ID NO: 111701 - DNA, 21 bp, Artificial Sequence
  primer
ggtcatggaaggactctagcc

SEQ ID NO: 111702 - DNA, 40 bp, Artificial Sequence
  primer
gtaaaacgacggccagtaaatgacctaaatggtaggagcc

SEQ ID NO: 111703 - DNA, 21 bp, Artificial Sequence
  primer
gggacagggatttgagttagg

SEQ ID NO: 111704 - DNA, 40 bp, Artificial Sequence
  primer
gtaaaacgacggccagtccactatggaaactccgttatgc

SEQ ID NO: 111705 - DNA, 24 bp, Artificial Sequence
  primer
catgataagagagggatgtgagag

SEQ ID NO: 111706 - DNA, 21 bp, Artificial Sequence
  primer
taagggcctggattctgactg

SEQ ID NO: 111707 - DNA, 22 bp, Artificial Sequence
  primer
caatgtgcttggcattatcaac

SEQ ID NO: 111708 - DNA, 21 bp, Artificial Sequence
  primer
ctccttaaaggcagagcaagc

SEQ ID NO: 111709 - DNA, 23 bp, Artificial Sequence
  primer
cgcatttaggtcaaattagctcc

SEQ ID NO: 111710 - DNA, 40 bp, Artificial Sequence
  primer
gtaaaacgacggccagttgtgacatacatcccaagatacg

SEQ ID NO: 111711 - DNA, 44 bp, Artificial Sequence
  primer
gtaaaacgacggccagttgaatatccagtgtacgagttgtttag

SEQ ID NO: 111712 - DNA, 23 bp, Artificial Sequence
  primer
ttcaaaccaccatgacctaaatg

SEQ ID NO: 111713 - DNA, 25 bp, Artificial Sequence
  primer
gctgtgtgaagaagagtaattgcat

SEQ ID NO: 111714 - DNA, 37 bp, Artificial Sequence
  primer
gtaaaacgacggccagtactttctgtcacagggcgtg

SEQ ID NO: 111715 - DNA, 38 bp, Artificial Sequence
  primer
gtaaaacgacggccagtccttagaatctgccaaatgcc

SEQ ID NO: 111716 - DNA, 28 bp, Artificial Sequence
  primer
cctactctgataatagggataacacagg

SEQ ID NO: 111717 - DNA, 37 bp, Artificial Sequence
  primer
gtaaaacgacggccagtcacgacctccatgatgtcac

SEQ ID NO: 111718 - DNA, 21 bp, Artificial Sequence
  primer
tttgcatgacataagcgaagc

SEQ ID NO: 111719 - DNA, 38 bp, Artificial Sequence; identical to SEQ ID NO: 111689
  primer

SEQ ID NO: 111720 - DNA, 38 bp, Artificial Sequence
  primer
gtaaaacgacggccagtcgcacctacctgtacgagacc

SEQ ID NO: 111721 - DNA, 37 bp, Artificial Sequence
  primer
gtaaaacgacggccagtgtggaaacagagaggtgccc

SEQ ID NO: 111722 - DNA, 19 bp, Artificial Sequence
  primer
gacaggtcagcaggcaatg

SEQ ID NO: 111723 - DNA, 38 bp, Artificial Sequence
  primer
gtaaaacgacggccagtgaaatttaggcaaggtgaccc

SEQ ID NO: 111724 - DNA, 38 bp, Artificial Sequence
  primer
gtaaaacgacggccagtgaactggaaatttacaccggg

SEQ ID NO: 111725 - DNA, 41 bp, Artificial Sequence
  primer
gtaaaacgacggccagttccctggtgaatatctatgaatcc

SEQ ID NO: 111726 - DNA, 21 bp, Artificial Sequence
  primer
tgcagtgaacactggatttgg

SEQ ID NO: 111727 - DNA, 22 bp, Artificial Sequence
  primer
gtctgtctttcttcctccaagg

SEQ ID NO: 111728 - DNA, 37 bp, Artificial Sequence
  primer
gtaaaacgacggccagtgagcccaaagtgggaaagag

SEQ ID NO: 111729 - DNA, 38 bp, Artificial Sequence
  primer
gtaaaacgacggccagtggataacatttccaggcaagc

SEQ ID NO: 111730 - DNA, 21 bp, Artificial Sequence
  primer
caaagcttgggatcctagtgg

SEQ ID NO: 111731 - DNA, 38 bp, Artificial Sequence
  primer
gtaaaacgacggccagttgtttcgaagggaactaagcc

SEQ ID NO: 111732 - DNA, 21 bp, Artificial Sequence
  primer
accacatccctacttcatggc

SEQ ID NO: 111733 - DNA, 21 bp, Artificial Sequence
  primer
aacttatgcctgggacagcag

SEQ ID NO: 111734 - DNA, 21 bp, Artificial Sequence
  primer
atcagcacatgactctccagc

SEQ ID NO: 111735 - DNA, 38 bp, Artificial Sequence
  primer
gtaaaacgacggccagtgctcccagagtcatcctgaag

SEQ ID NO: 111736 - DNA, 21 bp, Artificial Sequence
  primer
cccagccatgaaacagtaacc

SEQ ID NO: 111737 - DNA, 25 bp, Artificial Sequence
  primer
aaactgaactgtgagtttcttcagg

SEQ ID NO: 111738 - DNA, 42 bp, Artificial Sequence
  primer
gtaaaacgacggccagtgaacactaaataaaccaaatcggag

SEQ ID NO: 111739 - DNA, 26 bp, Artificial Sequence
  primer
aaatgtgtaacttgataaagcaggag

SEQ ID NO: 111740 - DNA, 38 bp, Artificial Sequence
  primer
gtaaaacgacggccagttcctcttcccaacacagtgag

SEQ ID NO: 111741 - DNA, 38 bp, Artificial Sequence
  primer
gtaaaacgacggccagtcttggagcccacatgttactg

SEQ ID NO: 111742 - DNA, 21 bp, Artificial Sequence
  primer
atgaagccagttgaccaaacc

SEQ ID NO: 111743 - DNA, 38 bp, Artificial Sequence
  primer
gtaaaacgacggccagtaggacaaagccaccacatttc

SEQ ID NO: 111744 - DNA, 39 bp, Artificial Sequence
  primer
gtaaaacgacggccagttgctagactaggctggtccaaa

SEQ ID NO: 111745 - DNA, 38 bp, Artificial Sequence
  primer
gtaaaacgacggccagtcaataccagccatgtggagtc

SEQ ID NO: 111746 - DNA, 38 bp, Artificial Sequence
  primer
gtaaaacgacggccagtaagccacatcatcttgagtcc

SEQ ID NO: 111747 - DNA, 22 bp, Artificial Sequence
  primer
gaacgatgtcaagttcaaaggc

SEQ ID NO: 111748 - DNA, 39 bp, Artificial Sequence
  primer
gtaaaacgacggccagtcagagtagcacctgcatgagac

SEQ ID NO: 111749 - DNA, 19 bp, Artificial Sequence
  primer
accagacgggttggaacag

SEQ ID NO: 111750 - DNA, 37 bp, Artificial Sequence
  primer
gtaaaacgacggccagtttctacccagccagtgcaag

SEQ ID NO: 111751 - DNA, 38 bp, Artificial Sequence
  primer
gtaaaacgacggccagtactgcctggatgaagggtaac

SEQ ID NO: 111752 - DNA, 22 bp, Artificial Sequence
  primer
ccctgcacatttatgaacaaag

SEQ ID NO: 111753 - DNA, 21 bp, Artificial Sequence
  primer
tgctatggtcacaagcaaagg

SEQ ID NO: 111754 - DNA, 38 bp, Artificial Sequence
  primer
gtaaaacgacggccagtattccatcagcttcttccagg

SEQ ID NO: 111755 - DNA, 21 bp, Artificial Sequence
  primer
tagacatggtgctggacttgg

SEQ ID NO: 111756 - DNA, 21 bp, Artificial Sequence
  primer
ctccatagccatctgacttcg

SEQ ID NO: 111757 - DNA, 21 bp, Artificial Sequence
  primer
tagagggcttcaacttccacc

SEQ ID NO: 111758 - DNA, 38 bp, Artificial Sequence
  primer
gtaaaacgacggccagtagaagcaagaagtggtcatgg

SEQ ID NO: 111759 - DNA, 20 bp, Artificial Sequence
  primer
ttccctgctctaaaggtggc

SEQ ID NO: 111760 - DNA, 38 bp, Artificial Sequence
  primer
gtaaaacgacggccagttcagggttaacctcacaccag

SEQ ID NO: 111761 - DNA, 38 bp, Artificial Sequence
  primer
gtaaaacgacggccagtgagggaggttcattcttccag

SEQ ID NO: 111762 - DNA, 21 bp, Artificial Sequence
  primer
tcccaaagaaaggctccatag

SEQ ID NO: 111763 - DNA, 38 bp, Artificial Sequence
  primer
gtaaaacgacggccagtaattgcagtgcttcttcccag

SEQ ID NO: 111764 - DNA, 40 bp, Artificial Sequence
  primer
gtaaaacgacggccagtaagaactgattccaagaagcctg

SEQ ID NO: 111765 - DNA, 21 bp, Artificial Sequence
  primer
gcgaagacttgggacttcttg

SEQ ID NO: 111766 - DNA, 21 bp, Artificial Sequence
  primer
aagccagaaaggaaatgaggc

SEQ ID NO: 111767 - DNA, 38 bp, Artificial Sequence
  primer
gtaaaacgacggccagttgatctcatcctcatccatgc

SEQ ID NO: 111768 - DNA, 21 bp, Artificial Sequence
  primer
gcctcaacaccctcagctatc

SEQ ID NO: 111769 - DNA, 37 bp, Artificial Sequence
  primer
gtaaaacgacggccagtccagtgagaggcatgtttgc

SEQ ID NO: 111770 - DNA, 38 bp, Artificial Sequence
  primer
gtaaaacgacggccagtagtgaggccagtaaaccatcc

SEQ ID NO: 111771 - DNA, 21 bp, Artificial Sequence
  primer
gtgagtttctgggaaagacgg

SEQ ID NO: 111772 - DNA, 38 bp, Artificial Sequence
  primer
gtaaaacgacggccagtcacttgcgtaggtgacacagc

SEQ ID NO: 111773 - DNA, 21 bp, Artificial Sequence
  primer
cagtgggtccctttctttctg

SEQ ID NO: 111774 - DNA, 38 bp, Artificial Sequence
  primer
gtaaaacgacggccagtcatgtacggtattcccaaggc

SEQ ID NO: 111775 - DNA, 21 bp, Artificial Sequence
  primer
ctttcggatggtaattgcctg

SEQ ID NO: 111776 - DNA, 21 bp, Artificial Sequence
  primer
gataacctgctcactccaccc

SEQ ID NO: 111777 - DNA, 21 bp, Artificial Sequence
  primer
tcaagtgactctgatgccagg

SEQ ID NO: 111778 - DNA, 21 bp, Artificial Sequence
  primer
aaattcctctctgaggccagg

SEQ ID NO: 111779 - DNA, 21 bp, Artificial Sequence
  primer
gccatatttgcccagtttctc

SEQ ID NO: 111780 - DNA, 37 bp, Artificial Sequence
  primer
gtaaaacgacggccagtgtagggacttccaggcaagc

SEQ ID NO: 111781 - DNA, 21 bp, Artificial Sequence
  primer
gtttaaagccagcactggacc

SEQ ID NO: 111782 - DNA, 38 bp, Artificial Sequence
  primer
gtaaaacgacggccagtcttcaggtccctgggaggtag

SEQ ID NO: 111783 - DNA, 37 bp, Artificial Sequence
  primer
gtaaaacgacggccagtcttggtggtgctcatgtttg

SEQ ID NO: 111784 - DNA, 35 bp, Artificial Sequence
  primer
gtaaaacgacggccagtcacctcccaggtgaggaa

SEQ ID NO: 111785 - DNA, 37 bp, Artificial Sequence
  primer
gtaaaacgacggccagtcgagcagtatctgccctttg

SEQ ID NO: 111786 - DNA, 20 bp, Artificial Sequence
  primer
ttaagtgtcctgtggcctgc

SEQ ID NO: 111787 - DNA, 19 bp, Artificial Sequence
  primer
gtcttcctgcagacctcgc

SEQ ID NO: 111788 - DNA, 36 bp, Artificial Sequence
  primer
gtaaaacgacggccagtccaggtccagggaaagacc

SEQ ID NO: 111789 - DNA, 38 bp, Artificial Sequence
  primer
gtaaaacgacggccagtgagttgcctgtgtctctctgc

SEQ ID NO: 111790 - DNA, 20 bp, Artificial Sequence
  primer
gccatcaaagatcttcagcg

SEQ ID NO: 111791 - DNA, 19 bp, Artificial Sequence
  primer
cagggcaccaggttagagg

SEQ ID NO: 111792 - DNA, 36 bp, Artificial Sequence
  primer
gtaaaacgacggccagtcactcgcacggacacgtag

SEQ ID NO: 111793 - DNA, 20 bp, Artificial Sequence
  primer
gtagagcttggcatcgggtc

SEQ ID NO: 111794 - DNA, 35 bp, Artificial Sequence
  primer
gtaaaacgacggccagtaccaccctgcaggaaagc

SEQ ID NO: 111795 - DNA, 19 bp, Artificial Sequence
  primer
aaggagaactcggcgtctg

SEQ ID NO: 111796 - DNA, 38 bp, Artificial Sequence
  primer
gtaaaacgacggccagtctcttggaggaagagacgtgg

SEQ ID NO: 111797 - DNA, 38 bp, Artificial Sequence
  primer
gtaaaacgacggccagtaaggtcaggtgctacgtgagg

SEQ ID NO: 111798 - DNA, 21 bp, Artificial Sequence
  primer
tcaaggaagtgatgccagatg

SEQ ID NO: 111799 - DNA, 20 bp, Artificial Sequence
  primer
ggaggacttcaaggtcccag

SEQ ID NO: 111800 - DNA, 38 bp, Artificial Sequence
  primer
gtaaaacgacggccagtcacagagcatctgtccacacc

SEQ ID NO: 111801 - DNA, 21 bp, Artificial Sequence
  primer
ttctgtgtctccctcaactgc

SEQ ID NO: 111802 - DNA, 38 bp, Artificial Sequence
  primer
gtaaaacgacggccagtgtacacacccttgttgtgcag

SEQ ID NO: 111803 - DNA, 37 bp, Artificial Sequence
  primer
gtaaaacgacggccagtagaggtgtaggtgcaggcag

SEQ ID NO: 111804 - DNA, 19 bp, Artificial Sequence
  primer
ggtaccactggccactccc

SEQ ID NO: 111805 - DNA, 21 bp, Artificial Sequence
  primer
accagtctccagtgggatgag

SEQ ID NO: 111806 - DNA, 21 bp, Artificial Sequence
  primer
taaacgtttgtgcaatgacgc

SEQ ID NO: 111807 - DNA, 37 bp, Artificial Sequence
  primer
gtaaaacgacggccagtctgcctttagtgcctccacc

SEQ ID NO: 111808 - DNA, 20 bp, Artificial Sequence
  primer
cctttgtgtgcactgggaag

SEQ ID NO: 111809 - DNA, 21 bp, Artificial Sequence
  primer
cagggtccttgactcttcacc

SEQ ID NO: 111810 - DNA, 21 bp, Artificial Sequence
  primer
acagacctcagtgagcagcag

SEQ ID NO: 111811 - DNA, 37 bp, Artificial Sequence
  primer
gtaaaacgacggccagtacaccagggtgtggtcagtg

SEQ ID NO: 111812 - DNA, 38 bp, Artificial Sequence
  primer
gtaaaacgacggccagtcaccttgctgtggtactgagg

SEQ ID NO: 111813 - DNA, 21 bp, Artificial Sequence
  primer
gagtattctgcaagggaagca

SEQ ID NO: 111814 - DNA, 21 bp, Artificial Sequence
  primer
aaactggcatctaatcctgcc

SEQ ID NO: 111815 - DNA, 21 bp, Artificial Sequence
  primer
ctcaggatccctgggaaagag

SEQ ID NO: 111816 - DNA, 21 bp, Artificial Sequence
  primer
cactttgcggtacatctccag

SEQ ID NO: 111817 - DNA, 38 bp, Artificial Sequence
  primer
gtaaaacgacggccagtaagaacagaggcaaatcaggc

SEQ ID NO: 111818 - DNA, 20 bp, Artificial Sequence
  primer
gctcatctgtgtagccctgg

SEQ ID NO: 111819 - DNA, 22 bp, Artificial Sequence
  primer
ccatcgtacaaggaagaagtgg

SEQ ID NO: 111820 - DNA, 20 bp, Artificial Sequence
  primer
ctctgggtggagacaagcag

SEQ ID NO: 111821 - DNA, 21 bp, Artificial Sequence
  primer
agatctttcctcaccagcacc

SEQ ID NO: 111822 - DNA, 21 bp, Artificial Sequence
  primer
gtccattccatcacactggag

SEQ ID NO: 111823 - DNA, 19 bp, Artificial Sequence
  primer
acagtacctgcaaaggcgg

SEQ ID NO: 111824 - DNA, 38 bp, Artificial Sequence
  primer
gtaaaacgacggccagtagaagggaggtgagggtgaac

SEQ ID NO: 111825 - DNA, 21 bp, Artificial Sequence
  primer
caaaccacttgccgagagaag

SEQ ID NO: 111826 - DNA, 21 bp, Artificial Sequence
  primer
tgctggagtctctcaatgtgg

SEQ ID NO: 111827 - DNA, 21 bp, Artificial Sequence
  primer
ggaagggaacttggagtaggg

SEQ ID NO: 111828 - DNA, 21 bp, Artificial Sequence
  primer
ctcggtcgatcctgtagaagc

SEQ ID NO: 111829 - DNA, 38 bp, Artificial Sequence
  primer
gtaaaacgacggccagtagctctcagaggcatgaggac

SEQ ID NO: 111830 - DNA, 38 bp, Artificial Sequence
  primer
gtaaaacgacggccagtcagggattcagaagtcatcgg

SEQ ID NO: 111831 - DNA, 21 bp, Artificial Sequence
  primer
ctgcctgttactctgcagtcg

SEQ ID NO: 111832 - DNA, 38 bp, Artificial Sequence
  primer
gtaaaacgacggccagtgaagtggaatgggacgatcac

SEQ ID NO: 111833 - DNA, 21 bp, Artificial Sequence
  primer
ccaggaagtttatgggctctg

SEQ ID NO: 111834 - DNA, 38 bp, Artificial Sequence
  primer
gtaaaacgacggccagtccaggaagtttatgggctctg

SEQ ID NO: 111835 - DNA, 21 bp, Artificial Sequence
  primer
agggtctggactgtgtcttcc

SEQ ID NO: 111836 - DNA, 20 bp, Artificial Sequence
  primer
aaaggcatatccaacccagc

SEQ ID NO: 111837 - DNA, 37 bp, Artificial Sequence
  primer
gtaaaacgacggccagttttccttacatgccgctgtc

SEQ ID NO: 111838 - DNA, 38 bp, Artificial Sequence
  primer
gtaaaacgacggccagtacaaatatgttcctgtgggcg

SEQ ID NO: 111839 - DNA, 21 bp, Artificial Sequence
  primer
ccacaaacaacagaggcagtc

SEQ ID NO: 111840 - DNA, 38 bp, Artificial Sequence
  primer
gtaaaacgacggccagtcatagcagtgcaggatctgtg

SEQ ID NO: 111841 - DNA, 38 bp, Artificial Sequence
  primer
gtaaaacgacggccagttgctgcaggtaatgtctacgc

SEQ ID NO: 111842 - DNA, 22 bp, Artificial Sequence
  primer
gcttgacatttccaaccatttc

SEQ ID NO: 111843 - DNA, 38 bp, Artificial Sequence
  primer
gtaaaacgacggccagtgaactttgaagcaaaggccag

SEQ ID NO: 111844 - DNA, 20 bp, Artificial Sequence
  primer
agtgctccagggatgagagg

SEQ ID NO: 111845 - DNA, 36 bp, Artificial Sequence
  primer
gtaaaacgacggccagtggcttgtgactggtggagg

SEQ ID NO: 111846 - DNA, 18 bp, Artificial Sequence
  primer
ctctccaacgccagctcc

SEQ ID NO: 111847 - DNA, 21 bp, Artificial Sequence
  primer
ttctatgactgtgggcattgg

SEQ ID NO: 111848 - DNA, 21 bp, Artificial Sequence
  primer
ggcaattccaggactagatgg

SEQ ID NO: 111849 - DNA, 37 bp, Artificial Sequence
  primer
gtaaaacgacggccagtctagaggagccacctccctg

SEQ ID NO: 111850 - DNA, 20 bp, Artificial Sequence
  primer
cagggtcaggatacgggaac

SEQ ID NO: 111851 - DNA, 22 bp, Artificial Sequence
  primer
gctacagtgttaactgtccggg

SEQ ID NO: 111852 - DNA, 38 bp, Artificial Sequence
  primer
gtaaaacgacggccagtgcagacatagggacaaggacc

SEQ ID NO: 111853 - DNA, 21 bp, Artificial Sequence
  primer
ctggttctccatagagctggc

SEQ ID NO: 111854 - DNA, 21 bp, Artificial Sequence
  primer
gatctaggaaagcagccaagc

SEQ ID NO: 111855 - DNA, 21 bp, Artificial Sequence
  primer
ggtccatacaattccaaaggc

SEQ ID NO: 111856 - DNA, 21 bp, Artificial Sequence
  primer
atgtcccagacaaatggaagg

SEQ ID NO: 111857 - DNA, 38 bp, Artificial Sequence
  primer
gtaaaacgacggccagtagtcttagggacaaagcagcg

SEQ ID NO: 111858 - DNA, 22 bp, Artificial Sequence
  primer
ttctcagtgctcagggctttac

SEQ ID NO: 111859 - DNA, 19 bp, Artificial Sequence
  primer
ggaatacgctctggcttgc

SEQ ID NO: 111860 - DNA, 21 bp, Artificial Sequence
  primer
aaggacagacgcttctgcaag

SEQ ID NO: 111861 - DNA, 20 bp, Artificial Sequence
  primer
agaagtagggcagcaggtgg

SEQ ID NO: 111862 - DNA, 37 bp, Artificial Sequence
  primer
gtaaaacgacggccagtactgaggctcctcgagttgg

SEQ ID NO: 111863 - DNA, 21 bp, Artificial Sequence
  primer
agtgacattaagaggcctggg

SEQ ID NO: 111864 - DNA, 21 bp, Artificial Sequence
  primer
aaccacagcaaactcagagcc

SEQ ID NO: 111865 - DNA, 23 bp, Artificial Sequence
  primer
tgcaagtcccttaagtaagcctc

SEQ ID NO: 111866 - DNA, 38 bp, Artificial Sequence
  primer
gtaaaacgacggccagtaccaatccagaccaaggaaag

SEQ ID NO: 111867 - DNA, 19 bp, Artificial Sequence
  primer
gcctgcctcaagtggactg

SEQ ID NO: 111868 - DNA, 38 bp, Artificial Sequence
  primer
gtaaaacgacggccagtccactctgatccattctgtgg

SEQ ID NO: 111869 - DNA, 21 bp, Artificial Sequence
  primer
aaggtggttgtcaatcaatgc

SEQ ID NO: 111870 - DNA, 23 bp, Artificial Sequence
  primer
ccattcattatcaggaaaggagg

SEQ ID NO: 111871 - DNA, 21 bp, Artificial Sequence
  primer
ccaaaggtatctatggccagc

SEQ ID NO: 111872 - DNA, 21 bp, Artificial Sequence
  primer
cctgaaccctaaactccctcc

SEQ ID NO: 111873 - DNA, 21 bp, Artificial Sequence
  primer
tcccagccaaaggtctttatg

SEQ ID NO: 111874 - DNA, 21 bp, Artificial Sequence
  primer
gatacatcctggcaaatgcac

SEQ ID NO: 111875 - DNA, 21 bp, Artificial Sequence
  primer
cctctctggcttcatggaaag

SEQ ID NO: 111876 - DNA, 38 bp, Artificial Sequence
  primer
gtaaaacgacggccagttagctccagaggccatttgtc

SEQ ID NO: 111877 - DNA, 38 bp, Artificial Sequence
  primer
gtaaaacgacggccagttaaacagcagggtgacagagc

SEQ ID NO: 111878 - DNA, 21 bp, Artificial Sequence
  primer
ccctttgatactgggttctcc

SEQ ID NO: 111879 - DNA, 37 bp, Artificial Sequence
  primer
gtaaaacgacggccagtgaaatcagcaactgggcctc

SEQ ID NO: 111880 - DNA, 20 bp, Artificial Sequence
  primer
ttgctcgtgcgttgacatac

SEQ ID NO: 111881 - DNA, 39 bp, Artificial Sequence
  primer
gtaaaacgacggccagtgcagcttcatcaatagctcctt

SEQ ID NO: 111882 - DNA, 38 bp, Artificial Sequence
  primer
gtaaaacgacggccagtaatgtgctgcttcctatacgc

SEQ ID NO: 111883 - DNA, 40 bp, Artificial Sequence
  primer
gtaaaacgacggccagttcctagcagtacacagtgaaccc

SEQ ID NO: 111884 - DNA, 38 bp, Artificial Sequence
  primer
gtaaaacgacggccagttggaatggcagctcactgtag

SEQ ID NO: 111885 - DNA, 37 bp, Artificial Sequence
  primer
gtaaaacgacggccagtgcatcatccaaacttctggc

SEQ ID NO: 111886 - DNA, 21 bp, Artificial Sequence
  primer
gtcctgcatgatccttgtcac

SEQ ID NO: 111887 - DNA, 38 bp, Artificial Sequence; identical to SEQ ID NO: 111884
  primer

SEQ ID NO: 111888 - DNA, 37 bp, Artificial Sequence
  primer
gtaaaacgacggccagtgtgaagctggactcacccac

SEQ ID NO: 111889 - DNA, 20 bp, Artificial Sequence
  primer
actaaagcccgcttggtctc

SEQ ID NO: 111890 - DNA, 21 bp, Artificial Sequence
  primer
tctccacagccacaaatgaag

SEQ ID NO: 111891 - DNA, 21 bp, Artificial Sequence
  primer
gagagtaccaatgcatgccag

SEQ ID NO: 111892 - DNA, 38 bp, Artificial Sequence
  primer
gtaaaacgacggccagtgcttcgaggtttctatgcctg

SEQ ID NO: 111893 - DNA, 38 bp, Artificial Sequence
  primer
gtaaaacgacggccagttcctctcagtacgaggttgcc

SEQ ID NO: 111894 - DNA, 19 bp, Artificial Sequence
  primer
gcctgactctccgttctcg

SEQ ID NO: 111895 - DNA, 38 bp, Artificial Sequence
  primer
gtaaaacgacggccagttcccagctgagaagtttaggg

SEQ ID NO: 111896 - DNA, 21 bp, Artificial Sequence
  primer
aacagggttcctgaacattcc

SEQ ID NO: 111897 - DNA, 38 bp, Artificial Sequence
  primer
gtaaaacgacggccagtaggagaggtgtcctgaggtcc

SEQ ID NO: 111898 - DNA, 21 bp, Artificial Sequence
  primer
aagacacaaacacgggaaacc

SEQ ID NO: 111899 - DNA, 21 bp, Artificial Sequence
  primer
gggtcctactggtctaggtgc

SEQ ID NO: 111900 - DNA, 38 bp, Artificial Sequence
  primer
gtaaaacgacggccagtaccaaaccagccttgaatacc

SEQ ID NO: 111901 - DNA, 21 bp, Artificial Sequence
  primer
tacagagaagcacatggcgac

SEQ ID NO: 111902 - DNA, 21 bp, Artificial Sequence
  primer
ccttggcattgtttgtccttc

SEQ ID NO: 111903 - DNA, 38 bp, Artificial Sequence
  primer
gtaaaacgacggccagtgtccctcctctcatgatccag

SEQ ID NO: 111904 - DNA, 38 bp, Artificial Sequence
  primer
gtaaaacgacggccagtttcctccaactattgggcaac

SEQ ID NO: 111905 - DNA, 21 bp, Artificial Sequence
  primer
tctgcccatctcacttaaacg

SEQ ID NO: 111906 - DNA, 21 bp, Artificial Sequence
  primer
gagaacaggaggcatgtaggc

SEQ ID NO: 111907 - DNA, 21 bp, Artificial Sequence
  primer
gagaggatgtgaccttcaggc

SEQ ID NO: 111908 - DNA, 22 bp, Artificial Sequence
  primer
cacgcctatctgtgtttgagtc

SEQ ID NO: 111909 - DNA, 20 bp, Artificial Sequence
  primer
ttgatgagcctcaggtctgg

SEQ ID NO: 111910 - DNA, 38 bp, Artificial Sequence
  primer
gtaaaacgacggccagttctacccagcacatggcatag

SEQ ID NO: 111911 - DNA, 38 bp, Artificial Sequence
  primer
gtaaaacgacggccagtaaaggtttcagccacaagcag

SEQ ID NO: 111912 - DNA, 38 bp, Artificial Sequence
  primer
gtaaaacgacggccagtaccaaggaccgagacacagac

SEQ ID NO: 111913 - DNA, 38 bp, Artificial Sequence
  primer
gtaaaacgacggccagttcagcatagacctgggtaggg

SEQ ID NO: 111914 - DNA, 40 bp, Artificial Sequence
  primer
gtaaaacgacggccagtaggtaagggattaggaaaggagc

SEQ ID NO: 111915 - DNA, 38 bp, Artificial Sequence
  primer
gtaaaacgacggccagtaatggaagggacaatgagtgg

SEQ ID NO: 111916 - DNA, 21 bp, Artificial Sequence
  primer
tcacctggatggaacttctcc

SEQ ID NO: 111917 - DNA, 21 bp, Artificial Sequence
  primer
agccagccttaccattctgac

SEQ ID NO: 111918 - DNA, 38 bp, Artificial Sequence
  primer
gtaaaacgacggccagtcctggtgagtgggagtatctg

SEQ ID NO: 111919 - DNA, 21 bp, Artificial Sequence
  primer
ctcaaactgggaatgctgacc

SEQ ID NO: 111920 - DNA, 21 bp, Artificial Sequence
  primer
ctcagataccctcaccttggc

SEQ ID NO: 111921 - DNA, 38 bp, Artificial Sequence
  primer
gtaaaacgacggccagtttcactgagacaggacgaacc

SEQ ID NO: 111922 - DNA, 38 bp, Artificial Sequence
  primer
gtaaaacgacggccagtagcgccacacgcttactttag

SEQ ID NO: 111923 - DNA, 35 bp, Artificial Sequence
  primer
gtaaaacgacggccagtgggacttggattcctggg

SEQ ID NO: 111924 - DNA, 38 bp, Artificial Sequence
  primer
gtaaaacgacggccagtgacactgggtggaaacctttg

SEQ ID NO: 111925 - DNA, 37 bp, Artificial Sequence
  primer
gtaaaacgacggccagtgaacagggccacagtttcag

SEQ ID NO: 111926 - DNA, 38 bp, Artificial Sequence
  primer
gtaaaacgacggccagtccctgtctccaacaaacaaac

SEQ ID NO: 111927 - DNA, 21 bp, Artificial Sequence
  primer
gatcttgctaggtctggctcc

SEQ ID NO: 111928 - DNA, 21 bp, Artificial Sequence
  primer
atctgtctcgaaccacttggg

SEQ ID NO: 111929 - DNA, 20 bp, Artificial Sequence
  primer
gtcacgagcagttcaatgcc

SEQ ID NO: 111930 - DNA, 38 bp, Artificial Sequence
  primer
gtaaaacgacggccagtcaccttgctaactgggcttag

SEQ ID NO: 111931 - DNA, 21 bp, Artificial Sequence
  primer
agcaaataaggctgggtcttg

SEQ ID NO: 111932 - DNA, 38 bp, Artificial Sequence
  primer
gtaaaacgacggccagtctgggtagcgaggttagcttg

SEQ ID NO: 111933 - DNA, 21 bp, Artificial Sequence
  primer
agggaaacagagtcttggtgg

SEQ ID NO: 111934 - DNA, 38 bp, Artificial Sequence
  primer
gtaaaacgacggccagttactggctgtgctaccgactg

SEQ ID NO: 111935 - DNA, 21 bp, Artificial Sequence
  primer
gtctgtcccaggcactttgtc

SEQ ID NO: 111936 - DNA, 22 bp, Artificial Sequence
  primer
tgacctaaggattcagtcaccc

SEQ ID NO: 111937 - DNA, 19 bp, Artificial Sequence
  primer
cagggctacttgcaccctc

SEQ ID NO: 111938 - DNA, 22 bp, Artificial Sequence
  primer
ccaaatgatcacctagacaccc

SEQ ID NO: 111939 - DNA, 38 bp, Artificial Sequence
  primer
gtaaaacgacggccagttgaaaccgactagctcagcac

SEQ ID NO: 111940 - DNA, 22 bp, Artificial Sequence
  primer
catgagaatgttctctttgccc

SEQ ID NO: 111941 - DNA, 38 bp, Artificial Sequence
  primer
gtaaaacgacggccagtaccttgttcgtggacatccct

SEQ ID NO: 111942 - DNA, 21 bp, Artificial Sequence
  primer
agagctctttctgcagttggc

SEQ ID NO: 111943 - DNA, 20 bp, Artificial Sequence
  primer
caaatgtgccagcactcctc

SEQ ID NO: 111944 - DNA, 20 bp, Artificial Sequence
  primer
agaagcatgccaatggacag

SEQ ID NO: 111945 - DNA, 21 bp, Artificial Sequence
  primer
cagactttggcagcgtgtaag

SEQ ID NO: 111946 - DNA, 37 bp, Artificial Sequence
  primer
gtaaaacgacggccagttgctgtctaggaaagcaggg

SEQ ID NO: 111947 - DNA, 21 bp, Artificial Sequence
  primer
tggcaaagagtcctcacattt

SEQ ID NO: 111948 - DNA, 21 bp, Artificial Sequence
  primer
gaccatcttcccattgtggac

SEQ ID NO: 111949 - DNA, 38 bp, Artificial Sequence
  primer
gtaaaacgacggccagtctaggttgtggtttgtggagg

SEQ ID NO: 111950 - DNA, 21 bp, Artificial Sequence
  primer
gagaatggagtggctgagagc

SEQ ID NO: 111951 - DNA, 21 bp, Artificial Sequence
  primer
tttgccaaggtagactcagcc

SEQ ID NO: 111952 - DNA, 38 bp, Artificial Sequence
  primer
gtaaaacgacggccagtactttggcggtatgtgaggtc

SEQ ID NO: 111953 - DNA, 22 bp, Artificial Sequence
  primer
cagtaccagctgtttctttggg

SEQ ID NO: 111954 - DNA, 38 bp, Artificial Sequence
  primer
gtaaaacgacggccagtaaacgaatgagaagggcagag

SEQ ID NO: 111955 - DNA, 21 bp, Artificial Sequence
  primer
gaagagagctgaccgtcttcc

SEQ ID NO: 111956 - DNA, 38 bp, Artificial Sequence
  primer
gtaaaacgacggccagtgacatagagggcagtgctcag

SEQ ID NO: 111957 - DNA, 21 bp, Artificial Sequence
  primer
aaggagaatggagtggctgag

SEQ ID NO: 111958 - DNA, 38 bp, Artificial Sequence
  primer
gtaaaacgacggccagtaaacaaccatggcatcagtcc

SEQ ID NO: 111959 - DNA, 22 bp, Artificial Sequence
  primer
gcagtggagctcagtagctagg

SEQ ID NO: 111960 - DNA, 23 bp, Artificial Sequence
  primer
ccaaggaatatgtcatggttcac

SEQ ID NO: 111961 - DNA, 21 bp, Artificial Sequence
  primer
catgtgggaatcccttctgtg

SEQ ID NO: 111962 - DNA, 38 bp, Artificial Sequence
  primer
gtaaaacgacggccagtctgctatgcctgttcccaaac

SEQ ID NO: 111963 - DNA, 41 bp, Artificial Sequence
  primer
gtaaaacgacggccagtgcaataacataagcaaattgggtg

SEQ ID NO: 111964 - DNA, 18 bp, Artificial Sequence
  primer
tttccctccttccaagcc

SEQ ID NO: 111965 - DNA, 22 bp, Artificial Sequence
  primer
tcgaagtggtctttctttgagc

SEQ ID NO: 111966 - DNA, 22 bp, Artificial Sequence
  primer
caggaaggagatgattggtgag

SEQ ID NO: 111967 - DNA, 35 bp, Artificial Sequence
  primer
gtaaaacgacggccagtgcaacccacaaaggaccc

SEQ ID NO: 111968 - DNA, 36 bp, Artificial Sequence
  primer
gtaaaacgacggccagttagaacatttggagccggg

SEQ ID NO: 111969 - DNA, 38 bp, Artificial Sequence
  primer
gtaaaacgacggccagtagccctttgtatgacagcacc

SEQ ID NO: 111970 - DNA, 21 bp, Artificial Sequence
  primer
acacagtgatggccatatccc

SEQ ID NO: 111971 - DNA, 47 bp, Artificial Sequence
  primer
gtaaaacgacggccagtaaactatgatatacagtgatacaacaccaa

SEQ ID NO: 111972 - DNA, 20 bp, Artificial Sequence
  primer
cctcaagtgatctgccttgg

SEQ ID NO: 111973 - DNA, 21 bp, Artificial Sequence
  primer
ccatgttggaagcaaagtcat

SEQ ID NO: 111974 - DNA, 38 bp, Artificial Sequence
  primer
gtaaaacgacggccagtgatgaggtaaagggtggttgc

SEQ ID NO: 111975 - DNA, 40 bp, Artificial Sequence
  primer
gtaaaacgacggccagtcatgtacagactgggtcatctcc

SEQ ID NO: 111976 - DNA, 38 bp, Artificial Sequence
  primer
gtaaaacgacggccagttaatgttatccctggtgcctg

SEQ ID NO: 111977 - DNA, 21 bp, Artificial Sequence
  primer
gctgctacctctagcagggtc

SEQ ID NO: 111978 - DNA, 38 bp, Artificial Sequence
  primer
gtaaaacgacggccagttttcccacaatctgcagaaac

SEQ ID NO: 111979 - DNA, 21 bp, Artificial Sequence
  primer
tcggttcatttacccaagagc

SEQ ID NO: 111980 - DNA, 37 bp, Artificial Sequence
  primer
gtaaaacgacggccagtgaagactgccaaagcctcaa

SEQ ID NO: 111981 - DNA, 39 bp, Artificial Sequence
  primer
gtaaaacgacggccagtacacagccggtatttaggaaac

SEQ ID NO: 111982 - DNA, 45 bp, Artificial Sequence
  primer
gtaaaacgacggccagttttgaaaggtactaaataggatgtcttg

SEQ ID NO: 111983 - DNA, 22 bp, Artificial Sequence
  primer
ccctgatccatggttaagatcc

SEQ ID NO: 111984 - DNA, 38 bp, Artificial Sequence
  primer
gtaaaacgacggccagtttggagcagataaggaatggg

SEQ ID NO: 111985 - DNA, 20 bp, Artificial Sequence
  primer
cacacctaccctctgctccc

SEQ ID NO: 111986 - DNA, 20 bp, Artificial Sequence
  primer
cggaccgtacttcaacatgc

SEQ ID NO: 111987 - DNA, 38 bp, Artificial Sequence; identical to SEQ ID NO: 42974
  primer

SEQ ID NO: 111988 - DNA, 21 bp, Artificial Sequence
  primer
tcaccagaatgaaaccagcag

SEQ ID NO: 111989 - DNA, 38 bp, Artificial Sequence
  primer
gtaaaacgacggccagtatgtctgccatgtgctttcag

SEQ ID NO: 111990 - DNA, 37 bp, Artificial Sequence
  primer
gtaaaacgacggccagttgtgtgcaccagaggtttcc

SEQ ID NO: 111991 - DNA, 20 bp, Artificial Sequence
  primer
cgtgctactgcattccagac

SEQ ID NO: 111992 - DNA, 21 bp, Artificial Sequence
  primer
acaccagaccaacgtcagctc

SEQ ID NO: 111993 - DNA, 18 bp, Artificial Sequence
  primer
ccctacttgggaggctgg

SEQ ID NO: 111994 - DNA, 38 bp, Artificial Sequence
  primer
gtaaaacgacggccagtgttgccagcactccttcctac

SEQ ID NO: 111995 - DNA, 20 bp, Artificial Sequence
  primer
gagtctcaaggcagcagtgg

SEQ ID NO: 111996 - DNA, 38 bp, Artificial Sequence
  primer
gtaaaacgacggccagttaggtgggcgttaagctatcc

SEQ ID NO: 111997 - DNA, 18 bp, Artificial Sequence
  primer
ccgagattgcaccattgc

SEQ ID NO: 111998 - DNA, 36 bp, Artificial Sequence
  primer
gtaaaacgacggccagtgggagatctgcatcacctg

SEQ ID NO: 111999 - DNA, 37 bp, Artificial Sequence; identical to SEQ ID NO: 9716
  primer

SEQ ID NO: 112000 - DNA, 21 bp, Artificial Sequence
  primer
gagcttgcagtgagctgagat

SEQ ID NO: 112001 - DNA, 18 bp, Artificial Sequence
  primer
tacaggcatgtgccaccc

SEQ ID NO: 112002 - DNA, 21 bp, Artificial Sequence
  primer
cagcccagagagaaacaaagg

SEQ ID NO: 112003 - DNA, 21 bp, Artificial Sequence
  primer
ggacagacaagggaaatgacc

SEQ ID NO: 112004 - DNA, 38 bp, Artificial Sequence
  primer
gtaaaacgacggccagtttggatgacataagcctgcac

SEQ ID NO: 112005 - DNA, 26 bp, Artificial Sequence
  primer
ttggttattgatcagtatgtattccc

SEQ ID NO: 112006 - DNA, 41 bp, Artificial Sequence
  primer
gtaaaacgacggccagttgttcttatgattaaggttgctgc

SEQ ID NO: 112007 - DNA, 21 bp, Artificial Sequence
  primer
gtcaagagatatgcggaaccc

SEQ ID NO: 112008 - DNA, 22 bp, Artificial Sequence
  primer
tcttaatttctgagagccagcc

SEQ ID NO: 112009 - DNA, 24 bp, Artificial Sequence
  primer
ttacaccatacatttcactcctgg

SEQ ID NO: 112010 - DNA, 24 bp, Artificial Sequence
  primer
ttaatcttgatgcatactggatgg

SEQ ID NO: 112011 - DNA, 26 bp, Artificial Sequence
  primer
ttgtaagcactatgtcattacgaagc

SEQ ID NO: 112012 - DNA, 23 bp, Artificial Sequence
  primer
tcaaagtgggacaaagaaacatc

SEQ ID NO: 112013 - DNA, 43 bp, Artificial Sequence
  primer
gtaaaacgacggccagtattaattcactcaaagaaactggatg

SEQ ID NO: 112014 - DNA, 21 bp, Artificial Sequence
  primer
ctcaatgagtgaatgcaaggc

SEQ ID NO: 112015 - DNA, 21 bp, Artificial Sequence
  primer
ccaacgtgaagagcacaactc

SEQ ID NO: 112016 - DNA, 21 bp, Artificial Sequence
  primer
gcacagtacctacgcgacaac

SEQ ID NO: 112017 - DNA, 24 bp, Artificial Sequence
  primer
gcttctctgtctgctgtttactcc

SEQ ID NO: 112018 - DNA, 38 bp, Artificial Sequence
  primer
gtaaaacgacggccagtatctctgcactcacagccaac

SEQ ID NO: 112019 - DNA, 21 bp, Artificial Sequence
  primer
agctggctcctaacaaccaag

SEQ ID NO: 112020 - DNA, 36 bp, Artificial Sequence
  primer
gtaaaacgacggccagtgaacggcaaggcaagaaag

SEQ ID NO: 112021 - DNA, 38 bp, Artificial Sequence
  primer
gtaaaacgacggccagtcctgagttgaagtgggtggag

SEQ ID NO: 112022 - DNA, 21 bp, Artificial Sequence
  primer
tccaaatgaaatgaatgcagg

SEQ ID NO: 112023 - DNA, 22 bp, Artificial Sequence
  primer
caccaagacttctgctgtaggg

SEQ ID NO: 112024 - DNA, 21 bp, Artificial Sequence
  primer
cctggaggtcagttcaaggac

SEQ ID NO: 112025 - DNA, 38 bp, Artificial Sequence
  primer
gtaaaacgacggccagttccctccacaggataaccttc

SEQ ID NO: 112026 - DNA, 21 bp, Artificial Sequence
  primer
cctcctggatagagggtaggg

SEQ ID NO: 112027 - DNA, 21 bp, Artificial Sequence
  primer
tcttcagtcccaggaacaagg

SEQ ID NO: 112028 - DNA, 21 bp, Artificial Sequence
  primer
gaaggatgcaaactgctcatc

SEQ ID NO: 112029 - DNA, 21 bp, Artificial Sequence
  primer
gaggtgtgatggatggaacag

SEQ ID NO: 112030 - DNA, 38 bp, Artificial Sequence
  primer
gtaaaacgacggccagtcctcaggtttcccgctactac

SEQ ID NO: 112031 - DNA, 39 bp, Artificial Sequence
  primer
gtaaaacgacggccagttcaagtgtcttacccttgtggg

SEQ ID NO: 112032 - DNA, 21 bp, Artificial Sequence
  primer
gcaccactgggaagagtaacc

SEQ ID NO: 112033 - DNA, 38 bp, Artificial Sequence
  primer
gtaaaacgacggccagtctgggaggacacgtcatacac

SEQ ID NO: 112034 - DNA, 21 bp, Artificial Sequence
  primer
gaacctgggttcttagcttgc

SEQ ID NO: 112035 - DNA, 38 bp, Artificial Sequence
  primer
gtaaaacgacggccagtgatcccaaatgttcccacaag

SEQ ID NO: 112036 - DNA, 21 bp, Artificial Sequence
  primer
gggttctaaggccctttcctc

SEQ ID NO: 112037 - DNA, 21 bp, Artificial Sequence
  primer
aaccaggccttccttcatttc

SEQ ID NO: 112038 - DNA, 42 bp, Artificial Sequence
  primer
gtaaaacgacggccagttttaaggtgtgcacaattctttctc

SEQ ID NO: 112039 - DNA, 38 bp, Artificial Sequence
  primer
gtaaaacgacggccagttcttgcataggccacaatctc

SEQ ID NO: 112040 - DNA, 38 bp, Artificial Sequence
  primer
gtaaaacgacggccagtttcctggaaccgaagaaacac

SEQ ID NO: 112041 - DNA, 40 bp, Artificial Sequence
  primer
gtaaaacgacggccagtccttggaggtacatttccaattt

SEQ ID NO: 112042 - DNA, 36 bp, Artificial Sequence
  primer
gtaaaacgacggccagtaagcatcatccatcccagg

SEQ ID NO: 112043 - DNA, 38 bp, Artificial Sequence
  primer
gtaaaacgacggccagtttgccagaatgcaaagtaacg

SEQ ID NO: 112044 - DNA, 25 bp, Artificial Sequence
  primer
gaattgagagcttcctaaatgtctg

SEQ ID NO: 112045 - DNA, 41 bp, Artificial Sequence
  primer
gtaaaacgacggccagtggaagccaaattaggaataatgag

SEQ ID NO: 112046 - DNA, 21 bp, Artificial Sequence
  primer
tccacatttgctgattccaag

SEQ ID NO: 112047 - DNA, 38 bp, Artificial Sequence
  primer
gtaaaacgacggccagtccatcattcactgaggtggag

SEQ ID NO: 112048 - DNA, 40 bp, Artificial Sequence
  primer
gtaaaacgacggccagtaaagtgcctgaaatgtgctactg

SEQ ID NO: 112049 - DNA, 27 bp, Artificial Sequence
  primer
gaaaccaactaacaggagatacatttg

SEQ ID NO: 112050 - DNA, 21 bp, Artificial Sequence
  primer
acaagtgcccatcttctaggg

SEQ ID NO: 112051 - DNA, 41 bp, Artificial Sequence
  primer
gtaaaacgacggccagttttgttcattctcagatctgttcc

SEQ ID NO: 112052 - DNA, 39 bp, Artificial Sequence
  primer
gtaaaacgacggccagtgctgaatatgagcaagtcctgg

SEQ ID NO: 112053 - DNA, 21 bp, Artificial Sequence
  primer
gtgcaatcgtgccactacact

SEQ ID NO: 112054 - DNA, 38 bp, Artificial Sequence
  primer
gtaaaacgacggccagtagttggcaatgcgctataagg

SEQ ID NO: 112055 - DNA, 21 bp, Artificial Sequence
  primer
tctcccaagaattcaagagcc

SEQ ID NO: 112056 - DNA, 25 bp, Artificial Sequence
  primer
caggaacagaataatccataaagcc

SEQ ID NO: 112057 - DNA, 19 bp, Artificial Sequence
  primer
ctggtaggcaacagtgccc

SEQ ID NO: 112058 - DNA, 20 bp, Artificial Sequence
  primer
aaattcaagcattcaggccc

SEQ ID NO: 112059 - DNA, 24 bp, Artificial Sequence
  primer
cagatctgtttacagcattgacag

SEQ ID NO: 112060 - DNA, 18 bp, Artificial Sequence
  primer
gcttcagcctcccaaagc

SEQ ID NO: 112061 - DNA, 22 bp, Artificial Sequence
  primer
ctgttagggcatcctaacttgt

SEQ ID NO: 112062 - DNA, 46 bp, Artificial Sequence
  primer
gtaaaacgacggccagtcatattaagaagaaattatgcaaactcca

SEQ ID NO: 112063 - DNA, 18 bp, Artificial Sequence
  primer
ccgtgcctggcctcttag

SEQ ID NO: 112064 - DNA, 42 bp, Artificial Sequence
  primer
gtaaaacgacggccagtgtggcaaatacattcagaataatca

SEQ ID NO: 112065 - DNA, 37 bp, Artificial Sequence
  primer
gtaaaacgacggccagtgggagagactttcacagccc

SEQ ID NO: 112066 - DNA, 38 bp, Artificial Sequence
  primer
gtaaaacgacggccagtctcactttctggagggctgtg

SEQ ID NO: 112067 - DNA, 38 bp, Artificial Sequence
  primer
gtaaaacgacggccagttcaggaaacccattctatggc

SEQ ID NO: 112068 - DNA, 38 bp, Artificial Sequence
  primer
gtaaaacgacggccagtgtagaacactgggccaacctc

SEQ ID NO: 112069 - DNA, 21 bp, Artificial Sequence
  primer
cacacaggctgaaatgtgagg

SEQ ID NO: 112070 - DNA, 38 bp, Artificial Sequence
  primer
gtaaaacgacggccagtaaacctgcctttagggaacac

SEQ ID NO: 112071 - DNA, 38 bp, Artificial Sequence
  primer
gtaaaacgacggccagtctgctgtggtggtttcatttc

SEQ ID NO: 112072 - DNA, 21 bp, Artificial Sequence
  primer
gggaggtactactgcctgtcg

SEQ ID NO: 112073 - DNA, 20 bp, Artificial Sequence
  primer
ttacgcagcaggatacccac

SEQ ID NO: 112074 - DNA, 21 bp, Artificial Sequence
  primer
aggtagtgctccttgactggg

SEQ ID NO: 112075 - DNA, 38 bp, Artificial Sequence
  primer
gtaaaacgacggccagtcgcttgacatcaactccaatc

SEQ ID NO: 112076 - DNA, 38 bp, Artificial Sequence
  primer
gtaaaacgacggccagtactcctttgatctcctgccac

SEQ ID NO: 112077 - DNA, 20 bp, Artificial Sequence
  primer
agtcccagttgggtcagtcc

SEQ ID NO: 112078 - DNA, 38 bp, Artificial Sequence
  primer
gtaaaacgacggccagtctaaggtagatctgggctggg

SEQ ID NO: 112079 - DNA, 38 bp, Artificial Sequence
  primer
gtaaaacgacggccagtgaactccaccgcctatgacag

SEQ ID NO: 112080 - DNA, 21 bp, Artificial Sequence
  primer
ggtagtcaggtactcccgctg

SEQ ID NO: 112081 - DNA, 21 bp, Artificial Sequence
  primer
tcatggctcaacagtgctttc

SEQ ID NO: 112082 - DNA, 21 bp, Artificial Sequence
  primer
atgtgtggtggacctacagcc

SEQ ID NO: 112083 - DNA, 37 bp, Artificial Sequence
  primer
gtaaaacgacggccagtctgttgggcttgaacttccc

SEQ ID NO: 112084 - DNA, 21 bp, Artificial Sequence
  primer
catgaaatacgtcagccatcg

SEQ ID NO: 112085 - DNA, 21 bp, Artificial Sequence
  primer
ctgtcgctcagtgagatggtg

SEQ ID NO: 112086 - DNA, 21 bp, Artificial Sequence
  primer
gtggacagcagtggtcacaag

SEQ ID NO: 112087 - DNA, 24 bp, Artificial Sequence
  primer
caattcagtggtaccctaaacaca

SEQ ID NO: 112088 - DNA, 39 bp, Artificial Sequence
  primer
gtaaaacgacggccagttgccagaataatgctccttcag

SEQ ID NO: 112089 - DNA, 38 bp, Artificial Sequence
  primer
gtaaaacgacggccagtcccgagtggtgaatttcaaag

SEQ ID NO: 112090 - DNA, 20 bp, Artificial Sequence
  primer
ctggagggaagttggctctg

SEQ ID NO: 112091 - DNA, 38 bp, Artificial Sequence
  primer
gtaaaacgacggccagtcccaggtcacatagttcatcc

SEQ ID NO: 112092 - DNA, 21 bp, Artificial Sequence
  primer
ttggaggcaaattcttcagtg

SEQ ID NO: 112093 - DNA, 21 bp, Artificial Sequence
  primer
aactcaggacagagaatgggc

SEQ ID NO: 112094 - DNA, 25 bp, Artificial Sequence
  primer
tgagttgatcactatctctgctctg

SEQ ID NO: 112095 - DNA, 21 bp, Artificial Sequence
  primer
actgagcatctcccactctgc

SEQ ID NO: 112096 - DNA, 38 bp, Artificial Sequence
  primer
gtaaaacgacggccagtatcctaagccattgttggcag

SEQ ID NO: 112097 - DNA, 21 bp, Artificial Sequence
  primer
acagaggcctgcccttagtag

SEQ ID NO: 112098 - DNA, 21 bp, Artificial Sequence
  primer
gtcttcgcgtcatgtatctcc

SEQ ID NO: 112099 - DNA, 38 bp, Artificial Sequence
  primer
gtaaaacgacggccagtacgaacgaaagggattgagag

SEQ ID NO: 112100 - DNA, 39 bp, Artificial Sequence
  primer
gtaaaacgacggccagtaataggcaagaaagcagctcac

SEQ ID NO: 112101 - DNA, 21 bp, Artificial Sequence
  primer
aggcctgtttccttctgtgtg

SEQ ID NO: 112102 - DNA, 41 bp, Artificial Sequence
  primer
gtaaaacgacggccagtttcaaggctcaatgttctcactac

SEQ ID NO: 112103 - DNA, 38 bp, Artificial Sequence
  primer
gtaaaacgacggccagtaacaggtacagacctcgctgg

SEQ ID NO: 112104 - DNA, 21 bp, Artificial Sequence
  primer
cctgccacctgaatttgttag

SEQ ID NO: 112105 - DNA, 21 bp, Artificial Sequence
  primer
gtcatgacctgatccctctgc

SEQ ID NO: 112106 - DNA, 20 bp, Artificial Sequence
  primer
agtcactgcacctccacctg

SEQ ID NO: 112107 - DNA, 40 bp, Artificial Sequence
  primer
gtaaaacgacggccagtgaatcccacactgaacatgaatc

SEQ ID NO: 112108 - DNA, 38 bp, Artificial Sequence
  primer
gtaaaacgacggccagttttgcacggcttcagtagaaa

SEQ ID NO: 112109 - DNA, 22 bp, Artificial Sequence
  primer
tgtggaattgtgggtaacttcc

SEQ ID NO: 112110 - DNA, 21 bp, Artificial Sequence
  primer
aacctggaagcctgctgtaag

SEQ ID NO: 112111 - DNA, 21 bp, Artificial Sequence
  primer
ttctggccaaagtccaggtag

SEQ ID NO: 112112 - DNA, 22 bp, Artificial Sequence
  primer
ttctagaagaatcatcgctggg

SEQ ID NO: 112113 - DNA, 21 bp, Artificial Sequence
  primer
gagagaagaggcatgtccagg

SEQ ID NO: 112114 - DNA, 22 bp, Artificial Sequence
  primer
ggagttacacaagtcctgtgcg

SEQ ID NO: 112115 - DNA, 21 bp, Artificial Sequence
  primer
tgtacttcccaatccaagctg

SEQ ID NO: 112116 - DNA, 40 bp, Artificial Sequence
  primer
gtaaaacgacggccagtgagtgacagagcaagacgctatc

SEQ ID NO: 112117 - DNA, 21 bp, Artificial Sequence
  primer
cccagggaagaaacagacttg

SEQ ID NO: 112118 - DNA, 21 bp, Artificial Sequence
  primer
aaagcatggatgatggagaca

SEQ ID NO: 112119 - DNA, 21 bp, Artificial Sequence
  primer
atgctgcatgtccactgactc

SEQ ID NO: 112120 - DNA, 19 bp, Artificial Sequence
  primer
aagcaccgtccatggaaac

SEQ ID NO: 112121 - DNA, 38 bp, Artificial Sequence
  primer
gtaaaacgacggccagttttcagtcaccactgcattcc

SEQ ID NO: 112122 - DNA, 37 bp, Artificial Sequence
  primer
gtaaaacgacggccagtagtcacccaaggctacccag

SEQ ID NO: 112123 - DNA, 22 bp, Artificial Sequence
  primer
gttgagcaagtccatgaatgag

SEQ ID NO: 112124 - DNA, 38 bp, Artificial Sequence
  primer
gtaaaacgacggccagtccatgtggagtgaatgggaag

SEQ ID NO: 112125 - DNA, 38 bp, Artificial Sequence
  primer
gtaaaacgacggccagttccctggactaaggtgaaacg

SEQ ID NO: 112126 - DNA, 37 bp, Artificial Sequence
  primer
gtaaaacgacggccagttagcaagtgctcacacgcac

SEQ ID NO: 112127 - DNA, 21 bp, Artificial Sequence
  primer
tattcacaatccgtgctccag

SEQ ID NO: 112128 - DNA, 38 bp, Artificial Sequence
  primer
gtaaaacgacggccagttcgtctgaaaggttgaggagg

SEQ ID NO: 112129 - DNA, 38 bp, Artificial Sequence
  primer
gtaaaacgacggccagtggctggaccactttaacaagg

SEQ ID NO: 112130 - DNA, 38 bp, Artificial Sequence
  primer
gtaaaacgacggccagtaaagaggccatcattcccttc

SEQ ID NO: 112131 - DNA, 23 bp, Artificial Sequence
  primer
tgaacatttcctgaaaggagacc

SEQ ID NO: 112132 - DNA, 21 bp, Artificial Sequence
  primer
ttgagatagctccattgcacc

SEQ ID NO: 112133 - DNA, 21 bp, Artificial Sequence
  primer
tctgccatggtatcaatgtcc

SEQ ID NO: 112134 - DNA, 37 bp, Artificial Sequence
  primer
gtaaaacgacggccagtccaacagccaaggtcaagag

SEQ ID NO: 112135 - DNA, 25 bp, Artificial Sequence
  primer
cactgatattctctgaatgggtagg

SEQ ID NO: 112136 - DNA, 38 bp, Artificial Sequence
  primer
gtaaaacgacggccagtagatagggcattctgccaaag

SEQ ID NO: 112137 - DNA, 39 bp, Artificial Sequence
  primer
gtaaaacgacggccagtcccatcctttagagttgtgagc

SEQ ID NO: 112138 - DNA, 22 bp, Artificial Sequence
  primer
ggctaacgagtccctgacaatc

SEQ ID NO: 112139 - DNA, 22 bp, Artificial Sequence
  primer
tgccttgtgtttagcaagtttc

SEQ ID NO: 112140 - DNA, 19 bp, Artificial Sequence
  primer
acagggccttgtgaggaag

SEQ ID NO: 112141 - DNA, 21 bp, Artificial Sequence
  primer
acgacaatgtcctgacatccc

SEQ ID NO: 112142 - DNA, 22 bp, Artificial Sequence
  primer
agaaccaatcccattcctgaag

SEQ ID NO: 112143 - DNA, 37 bp, Artificial Sequence
  primer
gtaaaacgacggccagttgctcagaattcaggcaaac

SEQ ID NO: 112144 - DNA, 22 bp, Artificial Sequence
  primer
gataaagtggaatgatgcctgc

SEQ ID NO: 112145 - DNA, 21 bp, Artificial Sequence
  primer
tacctcaccacaaactcaggc

SEQ ID NO: 112146 - DNA, 39 bp, Artificial Sequence
  primer
gtaaaacgacggccagtcagcccagcatgagaactttag

SEQ ID NO: 112147 - DNA, 40 bp, Artificial Sequence
  primer
gtaaaacgacggccagttgcttaaagctatgtcgctaacc

SEQ ID NO: 112148 - DNA, 37 bp, Artificial Sequence
  primer
gtaaaacgacggccagtgacctgcctacattggcctc

SEQ ID NO: 112149 - DNA, 21 bp, Artificial Sequence
  primer
taatggcctttccaccctatg

SEQ ID NO: 112150 - DNA, 20 bp, Artificial Sequence
  primer
gactaatgaacaggccgcag

SEQ ID NO: 112151 - DNA, 21 bp, Artificial Sequence
  primer
tgcgcctcatttacatttcac

SEQ ID NO: 112152 - DNA, 22 bp, Artificial Sequence
  primer
tttcctatggaaacatgccatc

SEQ ID NO: 112153 - DNA, 21 bp, Artificial Sequence
  primer
gccatgcagctacctctaacc

SEQ ID NO: 112154 - DNA, 27 bp, Artificial Sequence
  primer
tgaagtatttggtcttgacttaactgc

SEQ ID NO: 112155 - DNA, 41 bp, Artificial Sequence
  primer
gtaaaacgacggccagtttaagaatcactccacaccttcag

SEQ ID NO: 112156 - DNA, 38 bp, Artificial Sequence
  primer
gtaaaacgacggccagtaatttgtggcagcaagtcatc

SEQ ID NO: 112157 - DNA, 39 bp, Artificial Sequence
  primer
gtaaaacgacggccagttgactgcagatttctttcatgg

SEQ ID NO: 112158 - DNA, 22 bp, Artificial Sequence
  primer
tctaatccatgaaactggaggg

SEQ ID NO: 112159 - DNA, 23 bp, Artificial Sequence
  primer
gtcaatgatgggtttctgagact

SEQ ID NO: 112160 - DNA, 40 bp, Artificial Sequence
  primer
gtaaaacgacggccagtcacaatgctctcctttaagtacg

SEQ ID NO: 112161 - DNA, 22 bp, Artificial Sequence
  primer
tttcttcaaacaggtcaaatgc

SEQ ID NO: 112162 - DNA, 42 bp, Artificial Sequence
  primer
gtaaaacgacggccagttgtgacctagtagaagcaacacttc

SEQ ID NO: 112163 - DNA, 22 bp, Artificial Sequence
  primer
gggttatccgctgatattcaag

SEQ ID NO: 112164 - DNA, 21 bp, Artificial Sequence
  primer
gggtgacagaatgagaccttg

SEQ ID NO: 112165 - DNA, 44 bp, Artificial Sequence
  primer
gtaaaacgacggccagtaacaaactacgattagaacaactttcc

SEQ ID NO: 112166 - DNA, 38 bp, Artificial Sequence
  primer
gtaaaacgacggccagtaagcaggattcaaacacaggc

SEQ ID NO: 112167 - DNA, 21 bp, Artificial Sequence
  primer
caatcaaatttggcattggac

SEQ ID NO: 112168 - DNA, 38 bp, Artificial Sequence
  primer
gtaaaacgacggccagtcctttgccaattcctttcttc

SEQ ID NO: 112169 - DNA, 18 bp, Artificial Sequence
  primer
cgcccggccttataacag

SEQ ID NO: 112170 - DNA, 23 bp, Artificial Sequence
  primer
tgcagttgatttcagaaagatcc

SEQ ID NO: 112171 - DNA, 23 bp, Artificial Sequence
  primer
tgggatataaaccagcacagatg

SEQ ID NO: 112172 - DNA, 21 bp, Artificial Sequence
  primer
agggaaagtgataccaatggc

SEQ ID NO: 112173 - DNA, 24 bp, Artificial Sequence
  primer
tttcttgaaagcaagttctgaaag

SEQ ID NO: 112174 - DNA, 38 bp, Artificial Sequence
  primer
gtaaaacgacggccagtaatggctggtctgttaccacc

SEQ ID NO: 112175 - DNA, 37 bp, Artificial Sequence
  primer
gtaaaacgacggccagtgttcatgtcccagggtttgg

SEQ ID NO: 112176 - DNA, 21 bp, Artificial Sequence
  primer
attccagatgatccatcccac

SEQ ID NO: 112177 - DNA, 21 bp, Artificial Sequence
  primer
caccctcaggaggagagagac

SEQ ID NO: 112178 - DNA, 37 bp, Artificial Sequence
  primer
gtaaaacgacggccagtgcagaaggttcagcagcatc

SEQ ID NO: 112179 - DNA, 18 bp, Artificial Sequence
  primer
accaggacgccctctgtg

SEQ ID NO: 112180 - DNA, 21 bp, Artificial Sequence
  primer
gaagtcacacagcatgcacag

SEQ ID NO: 112181 - DNA, 21 bp, Artificial Sequence
  primer
catgcagaggtgacactccac

SEQ ID NO: 112182 - DNA, 21 bp, Artificial Sequence
  primer
gctgctcatatcccaggtgac

SEQ ID NO: 112183 - DNA, 21 bp, Artificial Sequence
  primer
tagacctaggcccagggagac

SEQ ID NO: 112184 - DNA, 20 bp, Artificial Sequence
  primer
ccctgtgaccaagtgaggtc

SEQ ID NO: 112185 - DNA, 38 bp, Artificial Sequence
  primer
gtaaaacgacggccagttttggagtggaataaggccag

SEQ ID NO: 112186 - DNA, 21 bp, Artificial Sequence
  primer
tccagagagaagctcagaggc

SEQ ID NO: 112187 - DNA, 21 bp, Artificial Sequence
  primer
tcaaactctaggcctcaagcg

SEQ ID NO: 112188 - DNA, 21 bp, Artificial Sequence
  primer
gccaggcagtttcaagaactc

SEQ ID NO: 112189 - DNA, 21 bp, Artificial Sequence
  primer
gagacgtagcaaggacaagcc

SEQ ID NO: 112190 - DNA, 38 bp, Artificial Sequence
  primer
gtaaaacgacggccagtgtcagcatccttcccttgttc

SEQ ID NO: 112191 - DNA, 39 bp, Artificial Sequence
  primer
gtaaaacgacggccagtgatgcactgttgtgtaagcagc

SEQ ID NO: 112192 - DNA, 37 bp, Artificial Sequence
  primer
gtaaaacgacggccagtcttcaccctggagatggagg

SEQ ID NO: 112193 - DNA, 38 bp, Artificial Sequence
  primer
gtaaaacgacggccagtacctctacctcctgggttcaa

SEQ ID NO: 112194 - DNA, 21 bp, Artificial Sequence
  primer
gtgcagctggcatactcacag

SEQ ID NO: 112195 - DNA, 38 bp, Artificial Sequence
  primer
gtaaaacgacggccagtttgcaaacgtggactctatgg

SEQ ID NO: 112196 - DNA, 20 bp, Artificial Sequence
  primer
ctgagagggaacaagcctcc

SEQ ID NO: 112197 - DNA, 21 bp, Artificial Sequence
  primer
ctggacctccacgctagagac

SEQ ID NO: 112198 - DNA, 20 bp, Artificial Sequence
  primer
cgatctagaaggtgggagcc

SEQ ID NO: 112199 - DNA, 38 bp, Artificial Sequence
  primer
gtaaaacgacggccagtagcagacagctccggtatgag

SEQ ID NO: 112200 - DNA, 37 bp, Artificial Sequence
  primer
gtaaaacgacggccagtctgtgtgtggtgctttgtcc

SEQ ID NO: 112201 - DNA, 21 bp, Artificial Sequence
  primer
aaggaggacagtgtcagggtg

SEQ ID NO: 112202 - DNA, 21 bp, Artificial Sequence
  primer
gcttgacccacttcctgagag

SEQ ID NO: 112203 - DNA, 24 bp, Artificial Sequence
  primer
aagctctaaatctccaacaggaaa

SEQ ID NO: 112204 - DNA, 38 bp, Artificial Sequence
  primer
gtaaaacgacggccagtggactccctaacaaatgggtg

SEQ ID NO: 112205 - DNA, 21 bp, Artificial Sequence
  primer
tgactcaatgcctcagcaatc

SEQ ID NO: 112206 - DNA, 20 bp, Artificial Sequence
  primer
cactgagctaagccacgtcc

SEQ ID NO: 112207 - DNA, 20 bp, Artificial Sequence
  primer
cacaggaagcaggtcagtcc

SEQ ID NO: 112208 - DNA, 21 bp, Artificial Sequence
  primer
ccagtcctgctagagggtcac

SEQ ID NO: 112209 - DNA, 21 bp, Artificial Sequence
  primer
ctcatcacccactcctcttcc

SEQ ID NO: 112210 - DNA, 21 bp, Artificial Sequence
  primer
ctggtatccaatgatccaccc

SEQ ID NO: 112211 - DNA, 21 bp, Artificial Sequence
  primer
tcgggcctaaggacttgatag

SEQ ID NO: 112212 - DNA, 21 bp, Artificial Sequence
  primer
aagagaccaggaggaagggac

SEQ ID NO: 112213 - DNA, 38 bp, Artificial Sequence
  primer
gtaaaacgacggccagtagagctcctgggtaaacatgg

SEQ ID NO: 112214 - DNA, 22 bp, Artificial Sequence
  primer
ccgagtcttagcagatcacacc

SEQ ID NO: 112215 - DNA, 21 bp, Artificial Sequence
  primer
cagcatgaactacaacccgag

SEQ ID NO: 112216 - DNA, 38 bp, Artificial Sequence
  primer
gtaaaacgacggccagtaatcttctccaacccagtccc

SEQ ID NO: 112217 - DNA, 21 bp, Artificial Sequence
  primer
cagatgctccacaatctggtc

SEQ ID NO: 112218 - DNA, 38 bp, Artificial Sequence
  primer
gtaaaacgacggccagtaaagcctacctcctagcccac

SEQ ID NO: 112219 - DNA, 19 bp, Artificial Sequence
  primer
aatgtgagcctcccaccac

SEQ ID NO: 112220 - DNA, 21 bp, Artificial Sequence
  primer
aaagccactccttccttccac

SEQ ID NO: 112221 - DNA, 21 bp, Artificial Sequence
  primer
gagcaaacccggatatttgac

SEQ ID NO: 112222 - DNA, 20 bp, Artificial Sequence
  primer
ctgattctgccctctgttcc

SEQ ID NO: 112223 - DNA, 38 bp, Artificial Sequence
  primer
gtaaaacgacggccagtatgtccttgagttgagctcgc

SEQ ID NO: 112224 - DNA, 21 bp, Artificial Sequence
  primer
agaaccacaccaggacaaagg

SEQ ID NO: 112225 - DNA, 21 bp, Artificial Sequence
  primer
acgcagtgaagggtttcaaag

SEQ ID NO: 112226 - DNA, 21 bp, Artificial Sequence
  primer
tgctggatcacagcctttatg

SEQ ID NO: 112227 - DNA, 21 bp, Artificial Sequence
  primer
ttcccataaatcctgaccctg

SEQ ID NO: 112228 - DNA, 21 bp, Artificial Sequence
  primer
tcagatgaaagggctttgtcc

SEQ ID NO: 112229 - DNA, 22 bp, Artificial Sequence
  primer
cacggcttcctcactactcttc

SEQ ID NO: 112230 - DNA, 21 bp, Artificial Sequence
  primer
ctgggcaatcatggagtacag

SEQ ID NO: 112231 - DNA, 21 bp, Artificial Sequence
  primer
agaggctacagagagccatga

SEQ ID NO: 112232 - DNA, 20 bp, Artificial Sequence
  primer
tgggtgatggagcaagactc

SEQ ID NO: 112233 - DNA, 24 bp, Artificial Sequence
  primer
aacaaatgaattatcaaaccaccc

SEQ ID NO: 112234 - DNA, 38 bp, Artificial Sequence
  primer
gtaaaacgacggccagtagaagggaattagtggagggc

SEQ ID NO: 112235 - DNA, 38 bp, Artificial Sequence
  primer
gtaaaacgacggccagtggttagcctcaactctcaggg

SEQ ID NO: 112236 - DNA, 21 bp, Artificial Sequence
  primer
tctcctgacctcatgatccac

SEQ ID NO: 112237 - DNA, 21 bp, Artificial Sequence
  primer
tcccaaagtgatgggattaca

SEQ ID NO: 112238 - DNA, 39 bp, Artificial Sequence
  primer
gtaaaacgacggccagtcgttagtgtcacaagccacatc

SEQ ID NO: 112239 - DNA, 21 bp, Artificial Sequence
  primer
tgtagctctccctcgtcactg

SEQ ID NO: 112240 - DNA, 21 bp, Artificial Sequence
  primer
ttcttcaaacaggaggcacag

SEQ ID NO: 112241 - DNA, 18 bp, Artificial Sequence
  primer
gcccaggtgggtcacaac

SEQ ID NO: 112242 - DNA, 21 bp, Artificial Sequence
  primer
acaagtgctgaccacctcctc

SEQ ID NO: 112243 - DNA, 37 bp, Artificial Sequence
  primer
gtaaaacgacggccagttctcagccatctgttgtccc

SEQ ID NO: 112244 - DNA, 38 bp, Artificial Sequence
  primer
gtaaaacgacggccagtattccaaagatgcacaggacc

SEQ ID NO: 112245 - DNA, 39 bp, Artificial Sequence
  primer
gtaaaacgacggccagtttgctggaacccacataatagg

SEQ ID NO: 112246 - DNA, 21 bp, Artificial Sequence
  primer
gcttggatttgcggaatctac

SEQ ID NO: 112247 - DNA, 38 bp, Artificial Sequence
  primer
gtaaaacgacggccagtaagtttccgcaaatgtcaagg

SEQ ID NO: 112248 - DNA, 21 bp, Artificial Sequence
  primer
cctccctccacaagatcaatg

SEQ ID NO: 112249 - DNA, 38 bp, Artificial Sequence
  primer
gtaaaacgacggccagtctaagccatcctagaccagcc

SEQ ID NO: 112250 - DNA, 21 bp, Artificial Sequence
  primer
tagccaaagctccctaattcc

SEQ ID NO: 112251 - DNA, 40 bp, Artificial Sequence
  primer
gtaaaacgacggccagtgccttatgtctcaaggcagatgt

SEQ ID NO: 112252 - DNA, 37 bp, Artificial Sequence
  primer
gtaaaacgacggccagtcaaattgcccatgaatctcc

SEQ ID NO: 112253 - DNA, 21 bp, Artificial Sequence
  primer
agctgcatgaaactgaattgg

SEQ ID NO: 112254 - DNA, 39 bp, Artificial Sequence
  primer
gtaaaacgacggccagtcccagcaagatatgttacctcc

SEQ ID NO: 112255 - DNA, 37 bp, Artificial Sequence
  primer
gtaaaacgacggccagtaaagatcctcccacctttgc

SEQ ID NO: 112256 - DNA, 40 bp, Artificial Sequence
  primer
gtaaaacgacggccagtggttgctctgatgaattaaaggc

SEQ ID NO: 112257 - DNA, 21 bp, Artificial Sequence
  primer
ttcctgaatagcagagctggg

SEQ ID NO: 112258 - DNA, 38 bp, Artificial Sequence
  primer
gtaaaacgacggccagttgtatgctcgaagactggtgc

SEQ ID NO: 112259 - DNA, 21 bp, Artificial Sequence
  primer
gccactaacaacggtgtctcc

SEQ ID NO: 112260 - DNA, 24 bp, Artificial Sequence
  primer
gattattggtggtcattcttagcc

SEQ ID NO: 112261 - DNA, 37 bp, Artificial Sequence
  primer
gtaaaacgacggccagtctcacatgcccttgatttcc

SEQ ID NO: 112262 - DNA, 38 bp, Artificial Sequence
  primer
gtaaaacgacggccagttttgtacttagctgccatccc

SEQ ID NO: 112263 - DNA, 22 bp, Artificial Sequence
  primer
gctggtaaggccaaacatattc

SEQ ID NO: 112264 - DNA, 21 bp, Artificial Sequence
  primer
agaatgccattaacccactgc

SEQ ID NO: 112265 - DNA, 18 bp, Artificial Sequence
  primer
aagggtgtgcgtgtgtgc

SEQ ID NO: 112266 - DNA, 38 bp, Artificial Sequence
  primer
gtaaaacgacggccagttgatagaacatggtgtggctg

SEQ ID NO: 112267 - DNA, 40 bp, Artificial Sequence
  primer
gtaaaacgacggccagtaggaatgcccttgacttcataac

SEQ ID NO: 112268 - DNA, 21 bp, Artificial Sequence
  primer
atatacactgcctcagctgcc

SEQ ID NO: 112269 - DNA, 21 bp, Artificial Sequence
  primer
tcactgacagctctgggaaag

SEQ ID NO: 112270 - DNA, 18 bp, Artificial Sequence
  primer
aggcaagagaatggcgtg

SEQ ID NO: 112271 - DNA, 21 bp, Artificial Sequence
  primer
ctgggctcaagtgatactccc

SEQ ID NO: 112272 - DNA, 43 bp, Artificial Sequence
  primer
gtaaaacgacggccagttcaatacatagtacatgctcagggag

SEQ ID NO: 112273 - DNA, 39 bp, Artificial Sequence
  primer
gtaaaacgacggccagttccagattctgtaaacttgccc

SEQ ID NO: 112274 - DNA, 21 bp, Artificial Sequence
  primer
agtccttccagctgcacaaag

SEQ ID NO: 112275 - DNA, 39 bp, Artificial Sequence
  primer
gtaaaacgacggccagtgcaaaggacagatctcctgaag

SEQ ID NO: 112276 - DNA, 38 bp, Artificial Sequence
  primer
gtaaaacgacggccagtgctgtctcacttgctgtcctc

SEQ ID NO: 112277 - DNA, 20 bp, Artificial Sequence
  primer
aaagttatcccaggccatcg

SEQ ID NO: 112278 - DNA, 41 bp, Artificial Sequence
  primer
gtaaaacgacggccagttgggttaaactacaggcaaatcac

SEQ ID NO: 112279 - DNA, 39 bp, Artificial Sequence
  primer
gtaaaacgacggccagtcgcagatctaataacctgaccc

SEQ ID NO: 112280 - DNA, 36 bp, Artificial Sequence
  primer
gtaaaacgacggccagtttagtgtgtgccgggagtg

SEQ ID NO: 112281 - DNA, 38 bp, Artificial Sequence
  primer
gtaaaacgacggccagtggcacatacttgtcccgttag

SEQ ID NO: 112282 - DNA, 21 bp, Artificial Sequence
  primer
ctctccctcaggagaaacctg

SEQ ID NO: 112283 - DNA, 21 bp, Artificial Sequence
  primer
ctgccgtttctgaactgtctg

SEQ ID NO: 112284 - DNA, 19 bp, Artificial Sequence
  primer
gcctgaggcttgcagagag

SEQ ID NO: 112285 - DNA, 38 bp, Artificial Sequence
  primer
gtaaaacgacggccagtctactatggctgacaggctgc

SEQ ID NO: 112286 - DNA, 22 bp, Artificial Sequence
  primer
aaggatcaatcagacttcaggg

SEQ ID NO: 112287 - DNA, 21 bp, Artificial Sequence
  primer
aaagggactgctttcatgagg

SEQ ID NO: 112288 - DNA, 21 bp, Artificial Sequence
  primer
acagaccgaaggatgtgaaag

SEQ ID NO: 112289 - DNA, 37 bp, Artificial Sequence
  primer
gtaaaacgacggccagtaagcattggaatggcaacag

SEQ ID NO: 112290 - DNA, 22 bp, Artificial Sequence
  primer
aaagggttatgtgaggagcaag

SEQ ID NO: 112291 - DNA, 21 bp, Artificial Sequence
  primer
tgctgctctagaaaggcaagc

SEQ ID NO: 112292 - DNA, 37 bp, Artificial Sequence
  primer
gtaaaacgacggccagtctcaggaccagcctgtcatc

SEQ ID NO: 112293 - DNA, 22 bp, Artificial Sequence
  primer
gtcgtttcctaatgtgcaacac

SEQ ID NO: 112294 - DNA, 39 bp, Artificial Sequence
  primer
gtaaaacgacggccagttgccaaatttcattacgaaaca

SEQ ID NO: 112295 - DNA, 21 bp, Artificial Sequence
  primer
ttatgaaggccttgggttgtc

SEQ ID NO: 112296 - DNA, 43 bp, Artificial Sequence
  primer
gtaaaacgacggccagtgaatatcctaatcctaagctttgctg

SEQ ID NO: 112297 - DNA, 41 bp, Artificial Sequence
  primer
gtaaaacgacggccagtaatccacacaattaaccagacaac

SEQ ID NO: 112298 - DNA, 21 bp, Artificial Sequence
  primer
ttcacatgcaaactgggagac

SEQ ID NO: 112299 - DNA, 21 bp, Artificial Sequence
  primer
tgaacatcatgccagacacag

SEQ ID NO: 112300 - DNA, 37 bp, Artificial Sequence
  primer
gtaaaacgacggccagtagtgcaactggcacagaagg

SEQ ID NO: 112301 - DNA, 39 bp, Artificial Sequence
  primer
gtaaaacgacggccagtgcttatttgctctggagtagcc

SEQ ID NO: 112302 - DNA, 38 bp, Artificial Sequence
  primer
gtaaaacgacggccagtaggccctcaactcatagcaac

SEQ ID NO: 112303 - DNA, 38 bp, Artificial Sequence
  primer
gtaaaacgacggccagtaatttcaagggcacaatgctc

SEQ ID NO: 112304 - DNA, 40 bp, Artificial Sequence
  primer
gtaaaacgacggccagttggctcattatttctttccagtc

SEQ ID NO: 112305 - DNA, 43 bp, Artificial Sequence
  primer
gtaaaacgacggccagtaacatcttagtgactgaagttcatgg

SEQ ID NO: 112306 - DNA, 43 bp, Artificial Sequence
  primer
gtaaaacgacggccagttttaaattgtaactccaatctccagg

SEQ ID NO: 112307 - DNA, 23 bp, Artificial Sequence
  primer
catcaattaatccaaaggcagac

SEQ ID NO: 112308 - DNA, 39 bp, Artificial Sequence
  primer
gtaaaacgacggccagttttcacatactggctaaggcac

SEQ ID NO: 112309 - DNA, 38 bp, Artificial Sequence
  primer
gtaaaacgacggccagtttgggtagctctttgaaagcc

SEQ ID NO: 112310 - DNA, 40 bp, Artificial Sequence
  primer
gtaaaacgacggccagttcaagctttgtcactttctaccg

SEQ ID NO: 112311 - DNA, 38 bp, Artificial Sequence
  primer
gtaaaacgacggccagttacacctgattccaacatggc

SEQ ID NO: 112312 - DNA, 22 bp, Artificial Sequence
  primer
tcacagccctgttgactacatc

SEQ ID NO: 112313 - DNA, 21 bp, Artificial Sequence
  primer
ggcccagatatccacctactg

SEQ ID NO: 112314 - DNA, 21 bp, Artificial Sequence
  primer
atctctgcttcttctccaccc

SEQ ID NO: 112315 - DNA, 22 bp, Artificial Sequence
  primer
gggaactagaccagtgttcacg

SEQ ID NO: 112316 - DNA, 21 bp, Artificial Sequence
  primer
cattccaacttccaaataccg

SEQ ID NO: 112317 - DNA, 21 bp, Artificial Sequence
  primer
ttccctgtccaaagtagccag

SEQ ID NO: 112318 - DNA, 22 bp, Artificial Sequence
  primer
aaactacacggcaagtattcgg

SEQ ID NO: 112319 - DNA, 21 bp, Artificial Sequence
  primer
ttcttggaggcaaagagaagc

SEQ ID NO: 112320 - DNA, 22 bp, Artificial Sequence
  primer
tggtagacatggctcaaattcc

SEQ ID NO: 112321 - DNA, 28 bp, Artificial Sequence
  primer
tgagtatgttagaactcagaacatcaaa

SEQ ID NO: 112322 - DNA, 23 bp, Artificial Sequence
  primer
ttggtggcaaataaacatactgg

SEQ ID NO: 112323 - DNA, 38 bp, Artificial Sequence
  primer
gtaaaacgacggccagttcaccttgctttctccatctg

SEQ ID NO: 112324 - DNA, 37 bp, Artificial Sequence
  primer
gtaaaacgacggccagtaacagactcgccctcaaagg

SEQ ID NO: 112325 - DNA, 21 bp, Artificial Sequence
  primer
actcagaaaccaggcacaagg

SEQ ID NO: 112326 - DNA, 21 bp, Artificial Sequence
  primer
gagtcacccatccacacagag

SEQ ID NO: 112327 - DNA, 38 bp, Artificial Sequence
  primer
gtaaaacgacggccagttagctcccaggcactcagaac

SEQ ID NO: 112328 - DNA, 36 bp, Artificial Sequence
  primer
gtaaaacgacggccagtcctggaacagcacctgacc

SEQ ID NO: 112329 - DNA, 38 bp, Artificial Sequence
  primer
gtaaaacgacggccagtagtgagcccttgttcctcatc

SEQ ID NO: 112330 - DNA, 38 bp, Artificial Sequence
  primer
gtaaaacgacggccagtaactgctcagccaggtgattc

SEQ ID NO: 112331 - DNA, 37 bp, Artificial Sequence
  primer
gtaaaacgacggccagtacgagagatgagcgcgtaag

SEQ ID NO: 112332 - DNA, 38 bp, Artificial Sequence
  primer
gtaaaacgacggccagtcttgtctaatgcttcaccgcc

SEQ ID NO: 112333 - DNA, 38 bp, Artificial Sequence
  primer
gtaaaacgacggccagtgacacaatttggttgtgagcc

SEQ ID NO: 112334 - DNA, 38 bp, Artificial Sequence
  primer
gtaaaacgacggccagttgcagtcatccaagtggtttc

SEQ ID NO: 112335 - DNA, 21 bp, Artificial Sequence
  primer
gtctggtctgcaagggtatgc

SEQ ID NO: 112336 - DNA, 20 bp, Artificial Sequence
  primer
acagacagtcatgccaaccc

SEQ ID NO: 112337 - DNA, 21 bp, Artificial Sequence
  primer
acacagggttactccaaagcc

SEQ ID NO: 112338 - DNA, 20 bp, Artificial Sequence
  primer
gagcgaaacgaggaaggaag

SEQ ID NO: 112339 - DNA, 39 bp, Artificial Sequence
  primer
gtaaaacgacggccagtaagggctagttgggaattatgc

SEQ ID NO: 112340 - DNA, 22 bp, Artificial Sequence
  primer
tggaatgaaacagaattgatgc

SEQ ID NO: 112341 - DNA, 21 bp, Artificial Sequence
  primer
ctattctcatgcttccctggc

SEQ ID NO: 112342 - DNA, 38 bp, Artificial Sequence
  primer
gtaaaacgacggccagtaagttcctcctccctttcctg

SEQ ID NO: 112343 - DNA, 42 bp, Artificial Sequence
  primer
gtaaaacgacggccagttcctgaacctcatattcctagttcc

SEQ ID NO: 112344 - DNA, 21 bp, Artificial Sequence
  primer
cacccaaccaactcaattgtc

SEQ ID NO: 112345 - DNA, 23 bp, Artificial Sequence
  primer
ccggagagcctaaactctaaatg

SEQ ID NO: 112346 - DNA, 21 bp, Artificial Sequence
  primer
ctcgaaggtcctgtcaacaac

SEQ ID NO: 112347 - DNA, 37 bp, Artificial Sequence
  primer
gtaaaacgacggccagtcattccacacagggatcagg

SEQ ID NO: 112348 - DNA, 21 bp, Artificial Sequence
  primer
atagggatgcctttgagttgg

SEQ ID NO: 112349 - DNA, 24 bp, Artificial Sequence
  primer
gctggttatgacctaagaaaggac

SEQ ID NO: 112350 - DNA, 21 bp, Artificial Sequence
  primer
tattgggtgctaaacgcttcc

SEQ ID NO: 112351 - DNA, 38 bp, Artificial Sequence
  primer
gtaaaacgacggccagtgactgactcctgttccaagcc

SEQ ID NO: 112352 - DNA, 20 bp, Artificial Sequence
  primer
aacaccctcaggcaaaggag

SEQ ID NO: 112353 - DNA, 38 bp, Artificial Sequence
  primer
gtaaaacgacggccagtcttaccttggaccagtttggc

SEQ ID NO: 112354 - DNA, 22 bp, Artificial Sequence
  primer
ggaagggaagggaataggaaac

SEQ ID NO: 112355 - DNA, 21 bp, Artificial Sequence
  primer
aattcactgtgcaatggttgg

SEQ ID NO: 112356 - DNA, 21 bp, Artificial Sequence
  primer
aaggcagtttctcaaagccag

SEQ ID NO: 112357 - DNA, 21 bp, Artificial Sequence
  primer
cctatgggaggatcacagctc

SEQ ID NO: 112358 - DNA, 21 bp, Artificial Sequence
  primer
cctcctgccaacactgaactc

SEQ ID NO: 112359 - DNA, 21 bp, Artificial Sequence
  primer
cttgtgacttaggcaccatgc

SEQ ID NO: 112360 - DNA, 38 bp, Artificial Sequence
  primer
gtaaaacgacggccagtagaggtcaaggctgcagtgag

SEQ ID NO: 112361 - DNA, 21 bp, Artificial Sequence
  primer
cagggaagaggaggaaggaac

SEQ ID NO: 112362 - DNA, 21 bp, Artificial Sequence
  primer
aatcatttgccaggaggtgag

SEQ ID NO: 112363 - DNA, 22 bp, Artificial Sequence
  primer
tcattatttgctctttagccgc

SEQ ID NO: 112364 - DNA, 38 bp, Artificial Sequence
  primer
gtaaaacgacggccagtgagaaagacagggtcagggtg

SEQ ID NO: 112365 - DNA, 19 bp, Artificial Sequence
  primer
ccgtgttcaatggcaggag

SEQ ID NO: 112366 - DNA, 45 bp, Artificial Sequence
  primer
gtaaaacgacggccagtcatttggttaaggtaaatattaggatga

SEQ ID NO: 112367 - DNA, 22 bp, Artificial Sequence
  primer
ctgtccatacaaacacacctcc

SEQ ID NO: 112368 - DNA, 40 bp, Artificial Sequence
  primer
gtaaaacgacggccagttgaggtaatctgaagagctgagg

SEQ ID NO: 112369 - DNA, 38 bp, Artificial Sequence
  primer
gtaaaacgacggccagtgacttcacaatcagatgctgc

SEQ ID NO: 112370 - DNA, 38 bp, Artificial Sequence
  primer
gtaaaacgacggccagttcatagtgttgggcaagttcc

SEQ ID NO: 112371 - DNA, 21 bp, Artificial Sequence
  primer
aggttgatgggtcgatttgtg

SEQ ID NO: 112372 - DNA, 40 bp, Artificial Sequence
  primer
gtaaaacgacggccagtttctgctcaatcactttgaatcc

SEQ ID NO: 112373 - DNA, 25 bp, Artificial Sequence
  primer
aaatatcaatgacagccataactgc

SEQ ID NO: 112374 - DNA, 21 bp, Artificial Sequence
  primer
aacacatcgcttctgggtaca

SEQ ID NO: 112375 - DNA, 38 bp, Artificial Sequence
  primer
gtaaaacgacggccagttcaagacagcctgacaattcc

SEQ ID NO: 112376 - DNA, 38 bp, Artificial Sequence
  primer
gtaaaacgacggccagtatgcatatattgcttaggccc

SEQ ID NO: 112377 - DNA, 38 bp, Artificial Sequence
  primer
gtaaaacgacggccagtcaattgagtgcccagagacac

SEQ ID NO: 112378 - DNA, 37 bp, Artificial Sequence
  primer
gtaaaacgacggccagttccacggctatgtttgaacc

SEQ ID NO: 112379 - DNA, 21 bp, Artificial Sequence
  primer
aatattcagggccatttgagc

SEQ ID NO: 112380 - DNA, 40 bp, Artificial Sequence
  primer
gtaaaacgacggccagtgtcagcagtcatactctcaaaca

SEQ ID NO: 112381 - DNA, 21 bp, Artificial Sequence
  primer
taatggagcagtgcaacacac

SEQ ID NO: 112382 - DNA, 40 bp, Artificial Sequence
  primer
gtaaaacgacggccagtaaaggcaaccaaatcatgtttac

SEQ ID NO: 112383 - DNA, 24 bp, Artificial Sequence
  primer
tgcatatgcttatactgaaacgga

SEQ ID NO: 112384 - DNA, 22 bp, Artificial Sequence
  primer
tttcaatgccatgacaaataat

SEQ ID NO: 112385 - DNA, 23 bp, Artificial Sequence
  primer
cgattgctatttgcagtatcacc

SEQ ID NO: 112386 - DNA, 25 bp, Artificial Sequence
  primer
gaaagctttaataacgtagcagtgg

SEQ ID NO: 112387 - DNA, 38 bp, Artificial Sequence
  primer
gtaaaacgacggccagtttgttcccttgcctactggtt

SEQ ID NO: 112388 - DNA, 26 bp, Artificial Sequence
  primer
gaagatgattcatttaggtccacatt

SEQ ID NO: 112389 - DNA, 39 bp, Artificial Sequence
  primer
gtaaaacgacggccagtgcgtagggagataggaaaccac

SEQ ID NO: 112390 - DNA, 21 bp, Artificial Sequence
  primer
cacagtgggagtccttgtttc

SEQ ID NO: 112391 - DNA, 21 bp, Artificial Sequence
  primer
cgctgagtgcacactttgttc

SEQ ID NO: 112392 - DNA, 38 bp, Artificial Sequence
  primer
gtaaaacgacggccagtggttaaccatcatgaaatcgg

SEQ ID NO: 112393 - DNA, 43 bp, Artificial Sequence
  primer
gtaaaacgacggccagtagctgcttaaatatacctcaacattt

SEQ ID NO: 112394 - DNA, 20 bp, Artificial Sequence
  primer
gcagagctttcagtgagctg

SEQ ID NO: 112395 - DNA, 26 bp, Artificial Sequence
  primer
tcccacagataaattattcttcaagg

SEQ ID NO: 112396 - DNA, 23 bp, Artificial Sequence
  primer
catgaaggtttgatttcatgttg

SEQ ID NO: 112397 - DNA, 39 bp, Artificial Sequence
  primer
gtaaaacgacggccagtaaatcatttgcttgtcaaaggc

SEQ ID NO: 112398 - DNA, 38 bp, Artificial Sequence
  primer
gtaaaacgacggccagtagtccagagacacaacccgag

SEQ ID NO: 112399 - DNA, 37 bp, Artificial Sequence
  primer
gtaaaacgacggccagtaaattccctgaggcagaagc

SEQ ID NO: 112400 - DNA, 27 bp, Artificial Sequence
  primer
acttaggaaacatgtgacattaggaac

SEQ ID NO: 112401 - DNA, 42 bp, Artificial Sequence
  primer
gtaaaacgacggccagtttataccatttatttgcccattagg

SEQ ID NO: 112402 - DNA, 44 bp, Artificial Sequence
  primer
gtaaaacgacggccagtagcaaataatgaataatcggtcttaaa

SEQ ID NO: 112403 - DNA, 38 bp, Artificial Sequence
  primer
gtaaaacgacggccagttttccagttgaatgatttggg

SEQ ID NO: 112404 - DNA, 22 bp, Artificial Sequence
  primer
cccttggacttcacttaatgcc

SEQ ID NO: 112405 - DNA, 22 bp, Artificial Sequence
  primer
tctgggtttgagttcatggttc

SEQ ID NO: 112406 - DNA, 43 bp, Artificial Sequence
  primer
gtaaaacgacggccagtaacactgtgagaaagtggaaagtaca

SEQ ID NO: 112407 - DNA, 42 bp, Artificial Sequence
  primer
gtaaaacgacggccagtacagaatgatctctggttacacaaa

SEQ ID NO: 112408 - DNA, 23 bp, Artificial Sequence
  primer
ttacagcttaatgttggaaaggc

SEQ ID NO: 112409 - DNA, 42 bp, Artificial Sequence
  primer
gtaaaacgacggccagttggaatgaagacactacactactcg

SEQ ID NO: 112410 - DNA, 21 bp, Artificial Sequence
  primer
ttctgaacagttgttgcccac

SEQ ID NO: 112411 - DNA, 39 bp, Artificial Sequence
  primer
gtaaaacgacggccagtacctaagacacaacctcaaggc

SEQ ID NO: 112412 - DNA, 21 bp, Artificial Sequence
  primer
ggaggcctgaaagggtaaatg

SEQ ID NO: 112413 - DNA, 43 bp, Artificial Sequence
  primer
gtaaaacgacggccagttgccagaagagattaaatgagtacat

SEQ ID NO: 112414 - DNA, 39 bp, Artificial Sequence
  primer
gtaaaacgacggccagtacctaaatcagacaaccaaggc

SEQ ID NO: 112415 - DNA, 21 bp, Artificial Sequence
  primer
catacactgcagccaaactcc

SEQ ID NO: 112416 - DNA, 40 bp, Artificial Sequence
  primer
gtaaaacgacggccagtgaattcttactcttgcccattcc

SEQ ID NO: 112417 - DNA, 41 bp, Artificial Sequence
  primer
gtaaaacgacggccagttgtgcactggataacaatgaactc

SEQ ID NO: 112418 - DNA, 21 bp, Artificial Sequence
  primer
caacgctttcaaactgctgtc

SEQ ID NO: 112419 - DNA, 21 bp, Artificial Sequence
  primer
cgccaagtcaaggacacttac

SEQ ID NO: 112420 - DNA, 38 bp, Artificial Sequence
  primer
gtaaaacgacggccagtggagaccctatgggcactttg

SEQ ID NO: 112421 - DNA, 38 bp, Artificial Sequence
  primer
gtaaaacgacggccagtcgggtctttgtgatcattctc

SEQ ID NO: 112422 - DNA, 43 bp, Artificial Sequence
  primer
gtaaaacgacggccagtaagtctaagtaaagactggtaaccgc

SEQ ID NO: 112423 - DNA, 21 bp, Artificial Sequence
  primer
tggtctgtcaacacaaggctc

SEQ ID NO: 112424 - DNA, 22 bp, Artificial Sequence
  primer
gttgtttgcagtcaagctatgg

SEQ ID NO: 112425 - DNA, 38 bp, Artificial Sequence
  primer
gtaaaacgacggccagtaagctgtgaatcggagaaagg

SEQ ID NO: 112426 - DNA, 26 bp, Artificial Sequence
  primer
ttctagtggagaaatagaagaggcac

SEQ ID NO: 112427 - DNA, 23 bp, Artificial Sequence
  primer
tccaaagtgctggagtcattaac

SEQ ID NO: 112428 - DNA, 35 bp, Artificial Sequence
  primer
gtaaaacgacggccagtaccgtgcccgacctagtg

SEQ ID NO: 112429 - DNA, 38 bp, Artificial Sequence
  primer
gtaaaacgacggccagtggacagtgaacctctgcatgt

SEQ ID NO: 112430 - DNA, 40 bp, Artificial Sequence
  primer
gtaaaacgacggccagtaacgaatcatgcatttaacttgg

SEQ ID NO: 112431 - DNA, 41 bp, Artificial Sequence
  primer
gtaaaacgacggccagtttctgacctcagattctcatctcc

SEQ ID NO: 112432 - DNA, 21 bp, Artificial Sequence
  primer
cttcaacgtggagcttaccag

SEQ ID NO: 112433 - DNA, 21 bp, Artificial Sequence
  primer
tctgtcgtaccaggcattacg

SEQ ID NO: 112434 - DNA, 38 bp, Artificial Sequence
  primer
gtaaaacgacggccagtccggtgtagcaatttctgagc

SEQ ID NO: 112435 - DNA, 20 bp, Artificial Sequence
  primer
aaattatttggctcaccgaa

SEQ ID NO: 112436 - DNA, 38 bp, Artificial Sequence
  primer
gtaaaacgacggccagtttaattaccgggagcaccttc

SEQ ID NO: 112437 - DNA, 38 bp, Artificial Sequence
  primer
gtaaaacgacggccagtttacaaggccaacacgatgag

SEQ ID NO: 112438 - DNA, 21 bp, Artificial Sequence
  primer
atgccgtcagaactctgaaac

SEQ ID NO: 112439 - DNA, 36 bp, Artificial Sequence
  primer
gtaaaacgacggccagtcaagcaattctcgcacagg

SEQ ID NO: 112440 - DNA, 38 bp, Artificial Sequence
  primer
gtaaaacgacggccagttctgacaacagcacaccacag

SEQ ID NO: 112441 - DNA, 21 bp, Artificial Sequence
  primer
tctgccttcaattcattccac

SEQ ID NO: 112442 - DNA, 21 bp, Artificial Sequence
  primer
caggactttccaacccatctc

SEQ ID NO: 112443 - DNA, 21 bp, Artificial Sequence
  primer
ctaagccttgagaagccctcc

SEQ ID NO: 112444 - DNA, 38 bp, Artificial Sequence
  primer
gtaaaacgacggccagttcagtcgtgtcctctagtcgc

SEQ ID NO: 112445 - DNA, 38 bp, Artificial Sequence
  primer
gtaaaacgacggccagttggtgggtgctcagtgaatag

SEQ ID NO: 112446 - DNA, 37 bp, Artificial Sequence
  primer
gtaaaacgacggccagtctgcttgatgcaaagccttc

SEQ ID NO: 112447 - DNA, 21 bp, Artificial Sequence
  primer
agctagggacacaggtcaagg

SEQ ID NO: 112448 - DNA, 38 bp, Artificial Sequence
  primer
gtaaaacgacggccagtcccacaaatagggcttcacag

SEQ ID NO: 112449 - DNA, 35 bp, Artificial Sequence
  primer
gtaaaacgacggccagttttgttgaggagccaggg

SEQ ID NO: 112450 - DNA, 21 bp, Artificial Sequence
  primer
catcgatcttcctggttctgg

SEQ ID NO: 112451 - DNA, 40 bp, Artificial Sequence
  primer
gtaaaacgacggccagtgggctctgttgaaatatggattc

SEQ ID NO: 112452 - DNA, 21 bp, Artificial Sequence
  primer
gcctgcttgaagaaatccaac

SEQ ID NO: 112453 - DNA, 21 bp, Artificial Sequence
  primer
gctgtgggatgatgtagggag

SEQ ID NO: 112454 - DNA, 21 bp, Artificial Sequence
  primer
cagtcaattgtccgttggatg

SEQ ID NO: 112455 - DNA, 38 bp, Artificial Sequence
  primer
gtaaaacgacggccagtgtggctcagcacatcagtgtc

SEQ ID NO: 112456 - DNA, 38 bp, Artificial Sequence
  primer
gtaaaacgacggccagtgacacgaatctgcctgagtcc

SEQ ID NO: 112457 - DNA, 19 bp, Artificial Sequence
  primer
cttcaccagacccagctcc

SEQ ID NO: 112458 - DNA, 20 bp, Artificial Sequence
  primer
ctatgggtgcagcagaggac

SEQ ID NO: 112459 - DNA, 38 bp, Artificial Sequence
  primer
gtaaaacgacggccagtccattgttaacctgggcctac

SEQ ID NO: 112460 - DNA, 20 bp, Artificial Sequence
  primer
agcctcacagacagctttgg

SEQ ID NO: 112461 - DNA, 38 bp, Artificial Sequence
  primer
gtaaaacgacggccagtcagctcagaatcccagagtcc

SEQ ID NO: 112462 - DNA, 38 bp, Artificial Sequence
  primer
gtaaaacgacggccagtggagaaatgagcatgtccctg

SEQ ID NO: 112463 - DNA, 37 bp, Artificial Sequence
  primer
gtaaaacgacggccagtgttgtgagacgcagggagac

SEQ ID NO: 112464 - DNA, 38 bp, Artificial Sequence
  primer
gtaaaacgacggccagttgccataccacatcctagctg

SEQ ID NO: 112465 - DNA, 38 bp, Artificial Sequence
  primer
gtaaaacgacggccagtcaagggcagggtgactacaag

SEQ ID NO: 112466 - DNA, 21 bp, Artificial Sequence
  primer
ggtgcatctacttacccacgg

SEQ ID NO: 112467 - DNA, 38 bp, Artificial Sequence
  primer
gtaaaacgacggccagtaagaaacaatcaccgtgtccc

SEQ ID NO: 112468 - DNA, 21 bp, Artificial Sequence
  primer
aaacagcctctaaatgagccg

SEQ ID NO: 112469 - DNA, 36 bp, Artificial Sequence
  primer
gtaaaacgacggccagtggatgtgaatgccatcctg

SEQ ID NO: 112470 - DNA, 20 bp, Artificial Sequence
  primer
agagcagagcatgggagagg

SEQ ID NO: 112471 - DNA, 21 bp, Artificial Sequence
  primer
ggctggcagaagtctataggg

SEQ ID NO: 112472 - DNA, 38 bp, Artificial Sequence
  primer
gtaaaacgacggccagtcaagatttccaacccaacctg

SEQ ID NO: 112473 - DNA, 22 bp, Artificial Sequence
  primer
acaatagaaccacaggtccagg

SEQ ID NO: 112474 - DNA, 35 bp, Artificial Sequence
  primer
gtaaaacgacggccagtcctcagcccgagagaacc

SEQ ID NO: 112475 - DNA, 39 bp, Artificial Sequence
  primer
gtaaaacgacggccagttcaacctctgagggaagttcag

SEQ ID NO: 112476 - DNA, 21 bp, Artificial Sequence
  primer
gttccttggagacttggaacc

SEQ ID NO: 112477 - DNA, 24 bp, Artificial Sequence
  primer
ctcctaggaaaggagctttgtaag

SEQ ID NO: 112478 - DNA, 21 bp, Artificial Sequence
  primer
cagcgatccacacattgaaag

SEQ ID NO: 112479 - DNA, 20 bp, Artificial Sequence
  primer
cagggtcgaaagggaagaac

SEQ ID NO: 112480 - DNA, 21 bp, Artificial Sequence
  primer
aaggagttcaagtgacctggg

SEQ ID NO: 112481 - DNA, 38 bp, Artificial Sequence
  primer
gtaaaacgacggccagtgaatcccacaaagtagccagg

SEQ ID NO: 112482 - DNA, 21 bp, Artificial Sequence
  primer
actgttagcgagcatttctgg

SEQ ID NO: 112483 - DNA, 21 bp, Artificial Sequence
  primer
gttcttcccagtctcacccac

SEQ ID NO: 112484 - DNA, 38 bp, Artificial Sequence
  primer
gtaaaacgacggccagtgaactaggaggcccttggaac

SEQ ID NO: 112485 - DNA, 21 bp, Artificial Sequence
  primer
attacctcagggttgtcggtc

SEQ ID NO: 112486 - DNA, 20 bp, Artificial Sequence
  primer
cttgcagagcggtctgattc

SEQ ID NO: 112487 - DNA, 21 bp, Artificial Sequence
  primer
cagccatcgttactgcttctg

SEQ ID NO: 112488 - DNA, 21 bp, Artificial Sequence
  primer
tggaaatcagaatggcaacag

SEQ ID NO: 112489 - DNA, 21 bp, Artificial Sequence
  primer
atccaagacttgcctccactg

SEQ ID NO: 112490 - DNA, 20 bp, Artificial Sequence
  primer
ttcagatgggtgcattagcc

SEQ ID NO: 112491 - DNA, 21 bp, Artificial Sequence
  primer
gcagcaaattgtgtgacactg

SEQ ID NO: 112492 - DNA, 38 bp, Artificial Sequence
  primer
gtaaaacgacggccagttctgaactcctggatggagac

SEQ ID NO: 112493 - DNA, 20 bp, Artificial Sequence
  primer
aacttggccacactttccag

SEQ ID NO: 112494 - DNA, 37 bp, Artificial Sequence
  primer
gtaaaacgacggccagttgtcagccttcggaaatcag

SEQ ID NO: 112495 - DNA, 18 bp, Artificial Sequence
  primer
acaaagctggagccaggg

SEQ ID NO: 112496 - DNA, 21 bp, Artificial Sequence
  primer
agttggcactggaggtctagc

SEQ ID NO: 112497 - DNA, 36 bp, Artificial Sequence
  primer
gtaaaacgacggccagtgagagggcgacttgctcac

SEQ ID NO: 112498 - DNA, 38 bp, Artificial Sequence
  primer
gtaaaacgacggccagtggcaccatgaactagacaagc

SEQ ID NO: 112499 - DNA, 38 bp, Artificial Sequence
  primer
gtaaaacgacggccagtcagacacatgcagagaggagg

SEQ ID NO: 112500 - DNA, 20 bp, Artificial Sequence
  primer
catgcagacttgctgacctg

SEQ ID NO: 112501 - DNA, 20 bp, Artificial Sequence
  primer
caggactgctcttgcctcac

SEQ ID NO: 112502 - DNA, 39 bp, Artificial Sequence
  primer
gtaaaacgacggccagtgcatctgacatcctttctgtcc

SEQ ID NO: 112503 - DNA, 38 bp, Artificial Sequence
  primer
gtaaaacgacggccagtaaggtgccttagaaggccaag

SEQ ID NO: 112504 - DNA, 18 bp, Artificial Sequence
  primer
ctccaactgcagggaggg

SEQ ID NO: 112505 - DNA, 38 bp, Artificial Sequence
  primer
gtaaaacgacggccagtaacggcacattaacaactggg

SEQ ID NO: 112506 - DNA, 21 bp, Artificial Sequence
  primer
gcatagtcagtgcagacctgg

SEQ ID NO: 112507 - DNA, 21 bp, Artificial Sequence
  primer
tataccagccacaaaggaggg

SEQ ID NO: 112508 - DNA, 38 bp, Artificial Sequence
  primer
gtaaaacgacggccagtcataggaactgggtctgggag

SEQ ID NO: 112509 - DNA, 21 bp, Artificial Sequence
  primer
gcaggtgactaagctcttggg

SEQ ID NO: 112510 - DNA, 37 bp, Artificial Sequence
  primer
gtaaaacgacggccagtagaccagggtgacaatgcag

SEQ ID NO: 112511 - DNA, 37 bp, Artificial Sequence
  primer
gtaaaacgacggccagttgagtgagctctgcggtgtc

SEQ ID NO: 112512 - DNA, 38 bp, Artificial Sequence
  primer
gtaaaacgacggccagttttgctgggctttccatctac

SEQ ID NO: 112513 - DNA, 18 bp, Artificial Sequence
  primer
acaaagctggagccaggg

SEQ ID NO: 112514 - DNA, 20 bp, Artificial Sequence
  primer
gttccagggtagaggaaccg

SEQ ID NO: 112515 - DNA, 37 bp, Artificial Sequence
  primer
gtaaaacgacggccagtagcgagaccctgtctcaatc

SEQ ID NO: 112516 - DNA, 21 bp, Artificial Sequence
  primer
tggaagacttcatggcaagag

SEQ ID NO: 112517 - DNA, 38 bp, Artificial Sequence
  primer
gtaaaacgacggccagtgccagacggatattccaactc

SEQ ID NO: 112518 - DNA, 20 bp, Artificial Sequence
  primer
ccatctgctcctctgtcctg

SEQ ID NO: 112519 - DNA, 20 bp, Artificial Sequence
  primer
ttggcttgggtttgctacag

SEQ ID NO: 112520 - DNA, 21 bp, Artificial Sequence
  primer
tgcctgtgtttctcaacttcg

SEQ ID NO: 112521 - DNA, 18 bp, Artificial Sequence
  primer
gccagctgtgctggtttc

SEQ ID NO: 112522 - DNA, 19 bp, Artificial Sequence
  primer
cacccagtcctcactgctg

SEQ ID NO: 112523 - DNA, 20 bp, Artificial Sequence
  primer
ctggccagcctgttgactac

SEQ ID NO: 112524 - DNA, 21 bp, Artificial Sequence
  primer
accgagattcaccaaggactc

SEQ ID NO: 112525 - DNA, 38 bp, Artificial Sequence
  primer
gtaaaacgacggccagtcactctgtatttccagggcag

SEQ ID NO: 112526 - DNA, 38 bp, Artificial Sequence
  primer
gtaaaacgacggccagtttaatgggcaaaggcactacc

SEQ ID NO: 112527 - DNA, 21 bp, Artificial Sequence
  primer
caacaacatttcaggcagagg

SEQ ID NO: 112528 - DNA, 21 bp, Artificial Sequence
  primer
aagaaagacgtcccacagctc

SEQ ID NO: 112529 - DNA, 38 bp, Artificial Sequence
  primer
gtaaaacgacggccagttccgtgtcatagaaacgatgg

SEQ ID NO: 112530 - DNA, 38 bp, Artificial Sequence
  primer
gtaaaacgacggccagtcaggcacagctccaggataac

SEQ ID NO: 112531 - DNA, 20 bp, Artificial Sequence
  primer
gcctggtgacaaagcaagac

SEQ ID NO: 112532 - DNA, 38 bp, Artificial Sequence
  primer
gtaaaacgacggccagtcctgtgtggaaggagaccatc

SEQ ID NO: 112533 - DNA, 21 bp, Artificial Sequence
  primer
ctgcaacgaggtgtcccttag

SEQ ID NO: 112534 - DNA, 38 bp, Artificial Sequence; identical to SEQ ID NO: 112512
  primer

SEQ ID NO: 112535 - DNA, 21 bp, Artificial Sequence
  primer
ctgcacacaggtagggtgatg

SEQ ID NO: 112536 - DNA, 21 bp, Artificial Sequence
  primer
ggttctctacaccctcgtccc

SEQ ID NO: 112537 - DNA, 40 bp, Artificial Sequence
  primer
gtaaaacgacggccagttctttcacacactaccacccaag

SEQ ID NO: 112538 - DNA, 21 bp, Artificial Sequence
  primer
aactgttggtgcctcataggg

SEQ ID NO: 112539 - DNA, 21 bp, Artificial Sequence
  primer
ttacattcctctaatggcggg

SEQ ID NO: 112540 - DNA, 39 bp, Artificial Sequence
  primer
gtaaaacgacggccagttgtgacaaatgtattgctggtg

SEQ ID NO: 112541 - DNA, 38 bp, Artificial Sequence
  primer
gtaaaacgacggccagtagctgctgggctagttaggag

SEQ ID NO: 112542 - DNA, 22 bp, Artificial Sequence
  primer
tctttgcctttcttccctcttc

SEQ ID NO: 112543 - DNA, 21 bp, Artificial Sequence
  primer
tgaaacataatggccagcaac

SEQ ID NO: 112544 - DNA, 38 bp, Artificial Sequence
  primer
gtaaaacgacggccagtacatgcgaatttccttcaacc

SEQ ID NO: 112545 - DNA, 25 bp, Artificial Sequence
  primer
tgtgactacatctatccaagaaccc

SEQ ID NO: 112546 - DNA, 21 bp, Artificial Sequence
  primer
gatttgggttcaaattgctgc

SEQ ID NO: 112547 - DNA, 22 bp, Artificial Sequence
  primer
gatggaaatctcacaaagcagg

SEQ ID NO: 112548 - DNA, 21 bp, Artificial Sequence
  primer
gtccaatcactgagcattgtg

SEQ ID NO: 112549 - DNA, 39 bp, Artificial Sequence
  primer
gtaaaacgacggccagtaacaagcactgagagatgctcc

SEQ ID NO: 112550 - DNA, 21 bp, Artificial Sequence
  primer
taattcaaggctcgcatttgg

SEQ ID NO: 112551 - DNA, 21 bp, Artificial Sequence
  primer
tagcagtcatctagggctggg

SEQ ID NO: 112552 - DNA, 18 bp, Artificial Sequence
  primer
ccgttggtcatcacctgg

SEQ ID NO: 112553 - DNA, 38 bp, Artificial Sequence
  primer
gtaaaacgacggccagtattaagggttcctcgtttggg

SEQ ID NO: 112554 - DNA, 21 bp, Artificial Sequence
  primer
atgctatgtcccatcaaccag

SEQ ID NO: 112555 - DNA, 39 bp, Artificial Sequence
  primer
gtaaaacgacggccagtgaaggagtcaaatgaacttggg

SEQ ID NO: 112556 - DNA, 23 bp, Artificial Sequence
  primer
tctgatcacttggaaagagaacc

SEQ ID NO: 112557 - DNA, 38 bp, Artificial Sequence
  primer
gtaaaacgacggccagtggcattactggctgatcgaag

SEQ ID NO: 112558 - DNA, 41 bp, Artificial Sequence
  primer
gtaaaacgacggccagtgaaagaatcacactgagagaaccc

SEQ ID NO: 112559 - DNA, 21 bp, Artificial Sequence
  primer
aaaggactcagggtcagcaac

SEQ ID NO: 112560 - DNA, 22 bp, Artificial Sequence
  primer
ctccttcttcagagatggcaac

SEQ ID NO: 112561 - DNA, 21 bp, Artificial Sequence
  primer
gttgggaagtacactgcttgc

SEQ ID NO: 112562 - DNA, 20 bp, Artificial Sequence
  primer
atgatgactgctttggctgg

SEQ ID NO: 112563 - DNA, 21 bp, Artificial Sequence
  primer
ggtaaacacgtctggcatgag

SEQ ID NO: 112564 - DNA, 20 bp, Artificial Sequence
  primer
tcattccagaggagccaatg

SEQ ID NO: 112565 - DNA, 21 bp, Artificial Sequence
  primer
ccaaattaagggagcaaaggg

SEQ ID NO: 112566 - DNA, 19 bp, Artificial Sequence
  primer
gctctggccctgttacgtc

SEQ ID NO: 112567 - DNA, 38 bp, Artificial Sequence
  primer
gtaaaacgacggccagtgttccaaagcaagtaagtgcg

SEQ ID NO: 112568 - DNA, 20 bp, Artificial Sequence
  primer
aatgctggctttgaggttcc

SEQ ID NO: 112569 - DNA, 38 bp, Artificial Sequence
  primer
gtaaaacgacggccagttttcaattaaggcttgccctg

SEQ ID NO: 112570 - DNA, 21 bp, Artificial Sequence
  primer
ggatcccagtttcaatctccc

SEQ ID NO: 112571 - DNA, 38 bp, Artificial Sequence
  primer
gtaaaacgacggccagtgacacactccacaatccaacg

SEQ ID NO: 112572 - DNA, 38 bp, Artificial Sequence
  primer
gtaaaacgacggccagttgcacacccaagacaagaatc

SEQ ID NO: 112573 - DNA, 21 bp, Artificial Sequence
  primer
atgattgcagaatcccacagg

SEQ ID NO: 112574 - DNA, 19 bp, Artificial Sequence
  primer
ccaggaagcagcagaggtc

SEQ ID NO: 112575 - DNA, 20 bp, Artificial Sequence
  primer
agcagtgccttcaatcatcg

SEQ ID NO: 112576 - DNA, 21 bp, Artificial Sequence
  primer
atttcttagtccatgccagcg

SEQ ID NO: 112577 - DNA, 38 bp, Artificial Sequence
  primer
gtaaaacgacggccagtgcacgatgagcttgtagatgg

SEQ ID NO: 112578 - DNA, 19 bp, Artificial Sequence
  primer
gcggtctgtcctcttctgc

SEQ ID NO: 112579 - DNA, 36 bp, Artificial Sequence
  primer
gtaaaacgacggccagtagaagaggaggaggccgag

SEQ ID NO: 112580 - DNA, 21 bp, Artificial Sequence
  primer
aaggactgtcggctggtaatg

SEQ ID NO: 112581 - DNA, 38 bp, Artificial Sequence
  primer
gtaaaacgacggccagtatacatgctaccctgacgacg

SEQ ID NO: 112582 - DNA, 21 bp, Artificial Sequence
  primer
agctcttccagggtttccttc

SEQ ID NO: 112583 - DNA, 38 bp, Artificial Sequence
  primer
gtaaaacgacggccagttcaagcagcttctcagtggtg

SEQ ID NO: 112584 - DNA, 38 bp, Artificial Sequence
  primer
gtaaaacgacggccagttctcctcttcaaatgccaatg

SEQ ID NO: 112585 - DNA, 21 bp, Artificial Sequence
  primer
tcgttattgaatgaagggaaa

SEQ ID NO: 112586 - DNA, 23 bp, Artificial Sequence
  primer
gcaacactctatcacctcacaca

SEQ ID NO: 112587 - DNA, 44 bp, Artificial Sequence
  primer
gtaaaacgacggccagtcgcttctataaatatgaccctttactg

SEQ ID NO: 112588 - DNA, 40 bp, Artificial Sequence
  primer
gtaaaacgacggccagttcatatgacaaggaatgcacagt

SEQ ID NO: 112589 - DNA, 43 bp, Artificial Sequence
  primer
gtaaaacgacggccagttttcaagatagatttctggtaggaaa

SEQ ID NO: 112590 - DNA, 22 bp, Artificial Sequence
  primer
gcaacaatggtataggacgatg

SEQ ID NO: 112591 - DNA, 38 bp, Artificial Sequence
  primer
gtaaaacgacggccagtggcctgttagcagcaattcta

SEQ ID NO: 112592 - DNA, 22 bp, Artificial Sequence
  primer
gatggtttgatgactggacaag

SEQ ID NO: 112593 - DNA, 23 bp, Artificial Sequence
  primer
gtaatttgccttggtgagacttc

SEQ ID NO: 112594 - DNA, 39 bp, Artificial Sequence
  primer
gtaaaacgacggccagtggcacaggtatgccatctgtag

SEQ ID NO: 112595 - DNA, 19 bp, Artificial Sequence
  primer
gagcatggtcccaaagcac

SEQ ID NO: 112596 - DNA, 21 bp, Artificial Sequence
  primer
tattcttccacgtgggtcctc

SEQ ID NO: 112597 - DNA, 23 bp, Artificial Sequence
  primer
cgactagaaagtcgaagacatgc

SEQ ID NO: 112598 - DNA, 20 bp, Artificial Sequence
  primer
ctgacctacgcgacttcctg

SEQ ID NO: 112599 - DNA, 20 bp, Artificial Sequence
  primer
gctgctgcactcttggaaac

SEQ ID NO: 112600 - DNA, 39 bp, Artificial Sequence
  primer
gtaaaacgacggccagtcgtccagggtctcagaactatc

SEQ ID NO: 112601 - DNA, 38 bp, Artificial Sequence
  primer
gtaaaacgacggccagtagagacccgtgtagccaagag

SEQ ID NO: 112602 - DNA, 38 bp, Artificial Sequence
  primer
gtaaaacgacggccagttctgcccagtgctaatctgag

SEQ ID NO: 112603 - DNA, 39 bp, Artificial Sequence
  primer
gtaaaacgacggccagtccctggtagagatgatcagagg

SEQ ID NO: 112604 - DNA, 38 bp, Artificial Sequence
  primer
gtaaaacgacggccagttcccagctcttcactatgtgg

SEQ ID NO: 112605 - DNA, 21 bp, Artificial Sequence
  primer
gcaatgagctatgattgcacc

SEQ ID NO: 112606 - DNA, 23 bp, Artificial Sequence
  primer
cagactgcttgggaaatgtttag

SEQ ID NO: 112607 - DNA, 20 bp, Artificial Sequence
  primer
taactcatcattgggcctgc

SEQ ID NO: 112608 - DNA, 42 bp, Artificial Sequence
  primer
gtaaaacgacggccagttgtgcatattagtgaaacttcccag

SEQ ID NO: 112609 - DNA, 37 bp, Artificial Sequence
  primer
gtaaaacgacggccagtggcacagaacattctgcctg

SEQ ID NO: 112610 - DNA, 37 bp, Artificial Sequence
  primer
gtaaaacgacggccagtaagacaagatgagggctggc

SEQ ID NO: 112611 - DNA, 19 bp, Artificial Sequence
  primer
gttcccatttggagcatgg

SEQ ID NO: 112612 - DNA, 20 bp, Artificial Sequence
  primer
ttgttgccatcttctgaggc

SEQ ID NO: 112613 - DNA, 21 bp, Artificial Sequence
  primer
cctcaaggctctgtatctccg

SEQ ID NO: 112614 - DNA, 20 bp, Artificial Sequence
  primer
caacatatggcggctactgg

SEQ ID NO: 112615 - DNA, 38 bp, Artificial Sequence
  primer
gtaaaacgacggccagtctggttgcctcctaagaaagg

SEQ ID NO: 112616 - DNA, 21 bp, Artificial Sequence
  primer
ctgggaatagctgggaaagag

SEQ ID NO: 112617 - DNA, 21 bp, Artificial Sequence
  primer
caagagcctaccatggctacc

SEQ ID NO: 112618 - DNA, 21 bp, Artificial Sequence
  primer
gactcagaggaggccagagac

SEQ ID NO: 112619 - DNA, 20 bp, Artificial Sequence
  primer
accttccctttctgtctgcc

SEQ ID NO: 112620 - DNA, 21 bp, Artificial Sequence
  primer
gctcagctgtatttccttggg

SEQ ID NO: 112621 - DNA, 21 bp, Artificial Sequence
  primer
ccaggtagatgtccatgaggg

SEQ ID NO: 112622 - DNA, 21 bp, Artificial Sequence
  primer
gtcgaagaagatgagcgtgtg

SEQ ID NO: 112623 - DNA, 20 bp, Artificial Sequence
  primer
ggctcaggtagctggcatag

SEQ ID NO: 112624 - DNA, 18 bp, Artificial Sequence
  primer
caggtagcgctcgtggag

SEQ ID NO: 112625 - DNA, 18 bp, Artificial Sequence
  primer
ctgcgaaccagcagatcc

SEQ ID NO: 112626 - DNA, 37 bp, Artificial Sequence
  primer
gtaaaacgacggccagtctgctgttgctacgagggtc

SEQ ID NO: 112627 - DNA, 18 bp, Artificial Sequence
  primer
tcctgcagggtgtcgaag

SEQ ID NO: 112628 - DNA, 18 bp, Artificial Sequence
  primer
ccttgctccagagccatc

SEQ ID NO: 112629 - DNA, 38 bp, Artificial Sequence
  primer
gtaaaacgacggccagtagtcctacagtgagcagcacg

SEQ ID NO: 112630 - DNA, 38 bp, Artificial Sequence
  primer
gtaaaacgacggccagtcaactgacgcatttgaccatc

SEQ ID NO: 112631 - DNA, 39 bp, Artificial Sequence
  primer
gtaaaacgacggccagtggctgtagctcatattgctctg

SEQ ID NO: 112632 - DNA, 38 bp, Artificial Sequence
  primer
gtaaaacgacggccagtctcagagagtactgagggccg

SEQ ID NO: 112633 - DNA, 21 bp, Artificial Sequence
  primer
ggtgcttaggcaggtctcatc

SEQ ID NO: 112634 - DNA, 38 bp, Artificial Sequence
  primer
gtaaaacgacggccagtgggcaatgatgggtcatacac

SEQ ID NO: 112635 - DNA, 38 bp, Artificial Sequence
  primer
gtaaaacgacggccagtagaaataccttcgggctccag

SEQ ID NO: 112636 - DNA, 21 bp, Artificial Sequence
  primer
ctgatttctcctggttcaccc

SEQ ID NO: 112637 - DNA, 22 bp, Artificial Sequence
  primer
ccgggacacaatgtttattgac

SEQ ID NO: 112638 - DNA, 21 bp, Artificial Sequence
  primer
agaagagtgaaactccgtcgc

SEQ ID NO: 112639 - DNA, 20 bp, Artificial Sequence
  primer
ggctgtttgggtgacgtttc

SEQ ID NO: 112640 - DNA, 38 bp, Artificial Sequence
  primer
gtaaaacgacggccagtccctcctactagcacaaaccc

SEQ ID NO: 112641 - DNA, 21 bp, Artificial Sequence
  primer
ccagggagcttattggtgatg

SEQ ID NO: 112642 - DNA, 21 bp, Artificial Sequence
  primer
gtgctatgaacggtagcccac

SEQ ID NO: 112643 - DNA, 21 bp, Artificial Sequence
  primer
gcatttcaagaaggcatgaac

SEQ ID NO: 112644 - DNA, 21 bp, Artificial Sequence
  primer
tctcctgaccttgtgatctgc

SEQ ID NO: 112645 - DNA, 21 bp, Artificial Sequence
  primer
ttccaactctcaccactcacc

SEQ ID NO: 112646 - DNA, 21 bp, Artificial Sequence
  primer
agacacttaaggcaggcatcc

SEQ ID NO: 112647 - DNA, 21 bp, Artificial Sequence
  primer
actccttctcctagctgtgcc

SEQ ID NO: 112648 - DNA, 39 bp, Artificial Sequence
  primer
gtaaaacgacggccagtgagccaagaggacatctttgtg

SEQ ID NO: 112649 - DNA, 38 bp, Artificial Sequence
  primer
gtaaaacgacggccagttcctaacaaacaagcctgtgg

SEQ ID NO: 112650 - DNA, 38 bp, Artificial Sequence
  primer
gtaaaacgacggccagtccacagatccaggaattaggg

SEQ ID NO: 112651 - DNA, 24 bp, Artificial Sequence
  primer
gggtcttgtatctcttcacactgc

SEQ ID NO: 112652 - DNA, 36 bp, Artificial Sequence
  primer
gtaaaacgacggccagtgtggctaaatggcactggg

SEQ ID NO: 112653 - DNA, 22 bp, Artificial Sequence
  primer
tgcttctcaaacacctttcagc

SEQ ID NO: 112654 - DNA, 39 bp, Artificial Sequence
  primer
gtaaaacgacggccagtcactagtgcttgaacaggaggc

SEQ ID NO: 112655 - DNA, 38 bp, Artificial Sequence
  primer
gtaaaacgacggccagtgaaagaggactgacctgtggc

SEQ ID NO: 112656 - DNA, 20 bp, Artificial Sequence
  primer
gcaagggctactcatcctcc

SEQ ID NO: 112657 - DNA, 20 bp, Artificial Sequence
  primer
gggactcagggaaatcaagc

SEQ ID NO: 112658 - DNA, 23 bp, Artificial Sequence
  primer
accagctcagtggcactatattc

SEQ ID NO: 112659 - DNA, 20 bp, Artificial Sequence
  primer
gggctttgtgttgtccattg

SEQ ID NO: 112660 - DNA, 36 bp, Artificial Sequence
  primer
gtaaaacgacggccagtggaaacacctggatgtggc

SEQ ID NO: 112661 - DNA, 21 bp, Artificial Sequence
  primer
attgcctgacactgtacctgg

SEQ ID NO: 112662 - DNA, 24 bp, Artificial Sequence
  primer
ggctttcacattatttggttgttc

SEQ ID NO: 112663 - DNA, 38 bp, Artificial Sequence
  primer
gtaaaacgacggccagttgcagttctccacatttccag

SEQ ID NO: 112664 - DNA, 25 bp, Artificial Sequence
  primer
agatgggtggtaaactcatctacac

SEQ ID NO: 112665 - DNA, 21 bp, Artificial Sequence
  primer
attgcgctggaaataatgatg

SEQ ID NO: 112666 - DNA, 18 bp, Artificial Sequence
  primer
gtgtgagccaacatgccc

SEQ ID NO: 112667 - DNA, 38 bp, Artificial Sequence
  primer
gtaaaacgacggccagtcagaaggatgaaagggtctgg

SEQ ID NO: 112668 - DNA, 18 bp, Artificial Sequence
  primer
ctcctggaaccctgggag

SEQ ID NO: 112669 - DNA, 21 bp, Artificial Sequence
  primer
ggaagaggtgtctatgccagc

SEQ ID NO: 112670 - DNA, 37 bp, Artificial Sequence
  primer
gtaaaacgacggccagtcccgcctccagtgataagag

SEQ ID NO: 112671 - DNA, 21 bp, Artificial Sequence
  primer
gcctgaggtcagagggtacag

SEQ ID NO: 112672 - DNA, 38 bp, Artificial Sequence
  primer
gtaaaacgacggccagtgtgtccaccaaaggagacagg

SEQ ID NO: 112673 - DNA, 38 bp, Artificial Sequence
  primer
gtaaaacgacggccagttgttgggtgagagggagaaag

SEQ ID NO: 112674 - DNA, 38 bp, Artificial Sequence
  primer
gtaaaacgacggccagtcgcttagtatcctgcctggtc

SEQ ID NO: 112675 - DNA, 20 bp, Artificial Sequence
  primer
ctcccattcaagcgattgtc

SEQ ID NO: 112676 - DNA, 37 bp, Artificial Sequence
  primer
gtaaaacgacggccagtcttgagccttagcgatgtgg

SEQ ID NO: 112677 - DNA, 21 bp, Artificial Sequence
  primer
ccagtgcatgagaagagatgg

SEQ ID NO: 112678 - DNA, 21 bp, Artificial Sequence
  primer
ttgaagttggaatctcgctcc

SEQ ID NO: 112679 - DNA, 21 bp, Artificial Sequence
  primer
gcatccggaagtggaattaag

SEQ ID NO: 112680 - DNA, 26 bp, Artificial Sequence
  primer
tccattaaagccatcatagcatatag

SEQ ID NO: 112681 - DNA, 18 bp, Artificial Sequence
  primer
taggttgagcccaagcgg

SEQ ID NO: 112682 - DNA, 38 bp, Artificial Sequence
  primer
gtaaaacgacggccagtgtggccagttcatgggtaatc

SEQ ID NO: 112683 - DNA, 38 bp, Artificial Sequence
  primer
gtaaaacgacggccagtagagcacaccagccttgtttc

SEQ ID NO: 112684 - DNA, 22 bp, Artificial Sequence
  primer
aaatcagaaatactgcatgggc

SEQ ID NO: 112685 - DNA, 38 bp, Artificial Sequence
  primer
gtaaaacgacggccagtcgacattaccactggaaaccc

SEQ ID NO: 112686 - DNA, 40 bp, Artificial Sequence
  primer
gtaaaacgacggccagttctcacattaccattgaaagcag

SEQ ID NO: 112687 - DNA, 43 bp, Artificial Sequence
  primer
gtaaaacgacggccagtatttggtcacctagtaaatcacagag

SEQ ID NO: 112688 - DNA, 21 bp, Artificial Sequence
  primer
caaggagtcttccaccacctc

SEQ ID NO: 112689 - DNA, 38 bp, Artificial Sequence
  primer
gtaaaacgacggccagtggtacaaactgcaggccaaag

SEQ ID NO: 112690 - DNA, 18 bp, Artificial Sequence
  primer
gaaccagagggaggcgtg

SEQ ID NO: 112691 - DNA, 38 bp, Artificial Sequence
  primer
gtaaaacgacggccagtatgcctgaaggacacttggac

SEQ ID NO: 112692 - DNA, 20 bp, Artificial Sequence
  primer
caaggatgccagcagtaagc

SEQ ID NO: 112693 - DNA, 21 bp, Artificial Sequence
  primer
cccactcttaatgctccagtg

SEQ ID NO: 112694 - DNA, 42 bp, Artificial Sequence
  primer
gtaaaacgacggccagtaatgaagaaatagtttccagcagac

SEQ ID NO: 112695 - DNA, 38 bp, Artificial Sequence
  primer
gtaaaacgacggccagtcccatctccagatgtttaggg

SEQ ID NO: 112696 - DNA, 21 bp, Artificial Sequence
  primer
acaatatcccagctgtagggc

SEQ ID NO: 112697 - DNA, 38 bp, Artificial Sequence
  primer
gtaaaacgacggccagtcgacatgaagcaagtggagtg

SEQ ID NO: 112698 - DNA, 20 bp, Artificial Sequence
  primer
actgtgcctggcctaatgtg

SEQ ID NO: 112699 - DNA, 29 bp, Artificial Sequence
  primer
aagaatgaacaagaagagtgagactattt

SEQ ID NO: 112700 - DNA, 21 bp, Artificial Sequence
  primer
cctctgtgagaaacacccaag

SEQ ID NO: 112701 - DNA, 21 bp, Artificial Sequence
  primer
ctaccttcccatcctcacctg

SEQ ID NO: 112702 - DNA, 38 bp, Artificial Sequence
  primer
gtaaaacgacggccagtcattacctgtgtatgcgctgc

SEQ ID NO: 112703 - DNA, 20 bp, Artificial Sequence
  primer
tctgtccattccacagggag

SEQ ID NO: 112704 - DNA, 21 bp, Artificial Sequence
  primer
gggatgaccacaccaggtaac

SEQ ID NO: 112705 - DNA, 38 bp, Artificial Sequence
  primer
gtaaaacgacggccagtaatgtctcaggttctgctccc

SEQ ID NO: 112706 - DNA, 23 bp, Artificial Sequence
  primer
ttgaggccaaatacaactattct

SEQ ID NO: 112707 - DNA, 41 bp, Artificial Sequence
  primer
gtaaaacgacggccagtcagcctaattaacacaatgaaggg

SEQ ID NO: 112708 - DNA, 22 bp, Artificial Sequence
  primer
accaagcagcatgattacagac

SEQ ID NO: 112709 - DNA, 25 bp, Artificial Sequence
  primer
cagcaggacctctgactactaactg

SEQ ID NO: 112710 - DNA, 21 bp, Artificial Sequence
  primer
gatctgcaaagaggctgttcc

SEQ ID NO: 112711 - DNA, 38 bp, Artificial Sequence
  primer
gtaaaacgacggccagtggattacaggtgtgagccact

SEQ ID NO: 112712 - DNA, 43 bp, Artificial Sequence
  primer
gtaaaacgacggccagtaccataaagtgaattgtgttaagagg

SEQ ID NO: 112713 - DNA, 44 bp, Artificial Sequence
  primer
gtaaaacgacggccagtccacaacagaataatccacatttatag

SEQ ID NO: 112714 - DNA, 21 bp, Artificial Sequence
  primer
tccaaaggtattctggcaatg

SEQ ID NO: 112715 - DNA, 38 bp, Artificial Sequence
  primer
gtaaaacgacggccagttgccatcccaataaatcagtg

SEQ ID NO: 112716 - DNA, 42 bp, Artificial Sequence
  primer
gtaaaacgacggccagtttatcagagcaattaaagatgcaaa

SEQ ID NO: 112717 - DNA, 38 bp, Artificial Sequence
  primer
gtaaaacgacggccagtcgaggtgcttcattctttcag

SEQ ID NO: 112718 - DNA, 21 bp, Artificial Sequence
  primer
taggctttcaggctgtgcttc

SEQ ID NO: 112719 - DNA, 24 bp, Artificial Sequence
  primer
gagggttgctaacacaagtagtgg

SEQ ID NO: 112720 - DNA, 39 bp, Artificial Sequence
  primer
gtaaaacgacggccagtgcttcatactgtttccaggtcc

SEQ ID NO: 112721 - DNA, 43 bp, Artificial Sequence
  primer
gtaaaacgacggccagtaagcagcagttagaaactttgttctt

SEQ ID NO: 112722 - DNA, 38 bp, Artificial Sequence
  primer
gtaaaacgacggccagtcaagctggtctcaaactcctg

SEQ ID NO: 112723 - DNA, 38 bp, Artificial Sequence
  primer
gtaaaacgacggccagtgcactggacacaaggatttct

SEQ ID NO: 112724 - DNA, 21 bp, Artificial Sequence
  primer
gcctctatttcccttctgtgg

SEQ ID NO: 112725 - DNA, 19 bp, Artificial Sequence
  primer
gacagaagcagggacaggc

SEQ ID NO: 112726 - DNA, 21 bp, Artificial Sequence
  primer
ggacaggaaacagctcaaagg

SEQ ID NO: 112727 - DNA, 21 bp, Artificial Sequence
  primer
attcctgaagactgtgggagg

SEQ ID NO: 112728 - DNA, 37 bp, Artificial Sequence
  primer
gtaaaacgacggccagtctccacgatggaccaggaac

SEQ ID NO: 112729 - DNA, 18 bp, Artificial Sequence
  primer
cacctaggcctcccgatg

SEQ ID NO: 112730 - DNA, 20 bp, Artificial Sequence
  primer
aagcctggcacctcagaaag

SEQ ID NO: 112731 - DNA, 38 bp, Artificial Sequence
  primer
gtaaaacgacggccagtaggacctcctctctgtgggac

SEQ ID NO: 112732 - DNA, 38 bp, Artificial Sequence
  primer
gtaaaacgacggccagtgaggtcaatattggtccaggg

SEQ ID NO: 112733 - DNA, 38 bp, Artificial Sequence
  primer
gtaaaacgacggccagtctggacagtgaaccatctggg

SEQ ID NO: 112734 - DNA, 21 bp, Artificial Sequence
  primer
taattcagcctggaaagcagc

SEQ ID NO: 112735 - DNA, 21 bp, Artificial Sequence
  primer
tcagagctggtacacagcagg

SEQ ID NO: 112736 - DNA, 20 bp, Artificial Sequence
  primer
atttctgtgtccctccctgg

SEQ ID NO: 112737 - DNA, 18 bp, Artificial Sequence
  primer
atgccggtcactgctgag

SEQ ID NO: 112738 - DNA, 36 bp, Artificial Sequence
  primer
gtaaaacgacggccagtctgcctggtcagcgagaag

SEQ ID NO: 112739 - DNA, 21 bp, Artificial Sequence
  primer
gtgtgaacactgggacaatgg

SEQ ID NO: 112740 - DNA, 21 bp, Artificial Sequence
  primer
tgagcggtaagatccggttag

SEQ ID NO: 112741 - DNA, 21 bp, Artificial Sequence
  primer
agtcagaacactcgaggaggg

SEQ ID NO: 112742 - DNA, 37 bp, Artificial Sequence
  primer
gtaaaacgacggccagtcagcctggaagagcagtgag

SEQ ID NO: 112743 - DNA, 21 bp, Artificial Sequence
  primer
tactcagattcggcttccctc

SEQ ID NO: 112744 - DNA, 37 bp, Artificial Sequence
  primer
gtaaaacgacggccagtgtcctgagcagggtctgagc

SEQ ID NO: 112745 - DNA, 20 bp, Artificial Sequence
  primer
gaccacctcccagtcagtcc

SEQ ID NO: 112746 - DNA, 21 bp, Artificial Sequence
  primer
tgtgtcatgcagaccatgttg

SEQ ID NO: 112747 - DNA, 20 bp, Artificial Sequence
  primer
catgaagccctcagccctac

SEQ ID NO: 112748 - DNA, 37 bp, Artificial Sequence
  primer
gtaaaacgacggccagtacagtcccacagtggtcgtc

SEQ ID NO: 112749 - DNA, 19 bp, Artificial Sequence
  primer
tccctcctgagtccacctg

SEQ ID NO: 112750 - DNA, 19 bp, Artificial Sequence
  primer
acagacccaagcatcccag

SEQ ID NO: 112751 - DNA, 20 bp, Artificial Sequence
  primer
aaagcctctacgctcttgcc

SEQ ID NO: 112752 - DNA, 21 bp, Artificial Sequence
  primer
tactggctgcagactagccac

SEQ ID NO: 112753 - DNA, 39 bp, Artificial Sequence
  primer
gtaaaacgacggccagtagagccagcagagatcatatcc

SEQ ID NO: 112754 - DNA, 38 bp, Artificial Sequence
  primer
gtaaaacgacggccagtgtcactcagcctctgggacag

SEQ ID NO: 112755 - DNA, 20 bp, Artificial Sequence
  primer
gccaaaccaccctagacgag

SEQ ID NO: 112756 - DNA, 38 bp, Artificial Sequence
  primer
gtaaaacgacggccagtcgacctgtgacctttgacctc

SEQ ID NO: 112757 - DNA, 21 bp, Artificial Sequence
  primer
tggcttagtaagtgcattgcg

SEQ ID NO: 112758 - DNA, 21 bp, Artificial Sequence
  primer
ctgcctcatgtctctcacctg

SEQ ID NO: 112759 - DNA, 21 bp, Artificial Sequence
  primer
gaccagtggacacctctttgc

SEQ ID NO: 112760 - DNA, 20 bp, Artificial Sequence
  primer
ctgccacagtccctatcctg

SEQ ID NO: 112761 - DNA, 37 bp, Artificial Sequence
  primer
gtaaaacgacggccagtctgaatccctctaggcaccc

SEQ ID NO: 112762 - DNA, 21 bp, Artificial Sequence
  primer
gacttagcttggagccaggag

SEQ ID NO: 112763 - DNA, 21 bp, Artificial Sequence
  primer
gtcttctcccaaagcaaccac

SEQ ID NO: 112764 - DNA, 44 bp, Artificial Sequence
  primer
gtaaaacgacggccagttggtaactaaccaggtggaagtactaa

SEQ ID NO: 112765 - DNA, 22 bp, Artificial Sequence
  primer
aagcatttgcagactgggatag

SEQ ID NO: 112766 - DNA, 21 bp, Artificial Sequence
  primer
atgctgatcctgtccttctgg

SEQ ID NO: 112767 - DNA, 39 bp, Artificial Sequence
  primer
gtaaaacgacggccagtcagcatttagaacagtttgggc

SEQ ID NO: 112768 - DNA, 38 bp, Artificial Sequence
  primer
gtaaaacgacggccagtgacttgtgggccactttctta

SEQ ID NO: 112769 - DNA, 22 bp, Artificial Sequence
  primer
ctgagtggcaagtttcactgac

SEQ ID NO: 112770 - DNA, 38 bp, Artificial Sequence
  primer
gtaaaacgacggccagtgatcaaggatgcgagatgttg

SEQ ID NO: 112771 - DNA, 21 bp, Artificial Sequence
  primer
cctttcaattccactcccaag

SEQ ID NO: 112772 - DNA, 41 bp, Artificial Sequence
  primer
gtaaaacgacggccagtggagctatgtctgcttaactttgc

SEQ ID NO: 112773 - DNA, 21 bp, Artificial Sequence
  primer
tgacatcagcacactctttgg

SEQ ID NO: 112774 - DNA, 39 bp, Artificial Sequence
  primer
gtaaaacgacggccagtaaatcaggtcctttccttcctc

SEQ ID NO: 112775 - DNA, 41 bp, Artificial Sequence
  primer
gtaaaacgacggccagtcatgacctatttcatatcagcagg

SEQ ID NO: 112776 - DNA, 44 bp, Artificial Sequence
  primer
gtaaaacgacggccagttttatgataatgtctgagtcaaaccac

SEQ ID NO: 112777 - DNA, 41 bp, Artificial Sequence
  primer
gtaaaacgacggccagtggtaagcatatctgaggtagtccg

SEQ ID NO: 112778 - DNA, 22 bp, Artificial Sequence
  primer
aacaggaggcaggaggtaaatc

SEQ ID NO: 112779 - DNA, 21 bp, Artificial Sequence
  primer
aaggaaacaggcacagaaagg

SEQ ID NO: 112780 - DNA, 21 bp, Artificial Sequence
  primer
aggtggtggatgcctgtaatc

SEQ ID NO: 112781 - DNA, 21 bp, Artificial Sequence
  primer
atgtccatctgatccctttgg

SEQ ID NO: 112782 - DNA, 20 bp, Artificial Sequence
  primer
gattacaggcgtgagcaacc

SEQ ID NO: 112783 - DNA, 21 bp, Artificial Sequence
  primer
gtttgtaaactcggctgcttg

SEQ ID NO: 112784 - DNA, 21 bp, Artificial Sequence
  primer
aatagggaagcacaggtcagg

SEQ ID NO: 112785 - DNA, 40 bp, Artificial Sequence
  primer
gtaaaacgacggccagtcctaaggtaggcactcactctgg

SEQ ID NO: 112786 - DNA, 21 bp, Artificial Sequence
  primer
agacagacagggagggaacag

SEQ ID NO: 112787 - DNA, 21 bp, Artificial Sequence
  primer
cacagaaggcaatcacctcag

SEQ ID NO: 112788 - DNA, 22 bp, Artificial Sequence
  primer
tgagtcttgtccttgaagaggg

SEQ ID NO: 112789 - DNA, 21 bp, Artificial Sequence
  primer
agctggagtgaactaggctgg

SEQ ID NO: 112790 - DNA, 38 bp, Artificial Sequence
  primer
gtaaaacgacggccagtaatcaaggcattgggactttg

SEQ ID NO: 112791 - DNA, 38 bp, Artificial Sequence
  primer
gtaaaacgacggccagtaactgagaggctcctgctgtc

SEQ ID NO: 112792 - DNA, 38 bp, Artificial Sequence
  primer
gtaaaacgacggccagtctggagttgatggctgtgttt

SEQ ID NO: 112793 - DNA, 37 bp, Artificial Sequence
  primer
gtaaaacgacggccagtgtaacatcatccagccacgg

SEQ ID NO: 112794 - DNA, 21 bp, Artificial Sequence
  primer
cagagggtacctggtcagcac

SEQ ID NO: 112795 - DNA, 21 bp, Artificial Sequence
  primer
catctgctatcatgagccctg

SEQ ID NO: 112796 - DNA, 19 bp, Artificial Sequence
  primer
ctagcttcctccgggactg

SEQ ID NO: 112797 - DNA, 20 bp, Artificial Sequence
  primer
gggtagagggactgtcaccg

SEQ ID NO: 112798 - DNA, 38 bp, Artificial Sequence
  primer
gtaaaacgacggccagtcggaagtgtcaggaaatgcta

SEQ ID NO: 112799 - DNA, 21 bp, Artificial Sequence
  primer
catgcttccataatccaaccc

SEQ ID NO: 112800 - DNA, 21 bp, Artificial Sequence
  primer
agaagatcagcgagagatcgg

SEQ ID NO: 112801 - DNA, 37 bp, Artificial Sequence
  primer
gtaaaacgacggccagtccacgtgagccaaagaagac

SEQ ID NO: 112802 - DNA, 37 bp, Artificial Sequence
  primer
gtaaaacgacggccagtccatgaggatgatttgctgg

SEQ ID NO: 112803 - DNA, 37 bp, Artificial Sequence
  primer
gtaaaacgacggccagttttctcatcctttgccttcg

SEQ ID NO: 112804 - DNA, 21 bp, Artificial Sequence
  primer
cttgcagatgccttggtacag

SEQ ID NO: 112805 - DNA, 21 bp, Artificial Sequence
  primer
tcaaagtcagggatgatggtg

SEQ ID NO: 112806 - DNA, 38 bp, Artificial Sequence
  primer
gtaaaacgacggccagtgaagacggtgaagagcaggtc

SEQ ID NO: 112807 - DNA, 38 bp, Artificial Sequence
  primer
gtaaaacgacggccagtgagactcagagatgggatggg

SEQ ID NO: 112808 - DNA, 39 bp, Artificial Sequence
  primer
gtaaaacgacggccagtgctcaaatctgtatcacctgcc

SEQ ID NO: 112809 - DNA, 38 bp, Artificial Sequence
  primer
gtaaaacgacggccagtctgacacttccatccatctgc

SEQ ID NO: 112810 - DNA, 40 bp, Artificial Sequence
  primer
gtaaaacgacggccagttttgtcaaggattctgcctattg

SEQ ID NO: 112811 - DNA, 44 bp, Artificial Sequence
  primer
gtaaaacgacggccagtttgtatcaggtttaaaggtaaatttgg

SEQ ID NO: 112812 - DNA, 39 bp, Artificial Sequence
  primer
gtaaaacgacggccagtgcttatcagcaattcctctccc

SEQ ID NO: 112813 - DNA, 44 bp, Artificial Sequence
  primer
gtaaaacgacggccagtcaggatgtttagaaaccatttagacaa

SEQ ID NO: 112814 - DNA, 22 bp, Artificial Sequence
  primer
ccctcttgcctcagtgtagaga

SEQ ID NO: 112815 - DNA, 38 bp, Artificial Sequence
  primer
gtaaaacgacggccagtttaagaaagcaaggagctggg

SEQ ID NO: 112816 - DNA, 22 bp, Artificial Sequence
  primer
gaaactatttctcccattgccc

SEQ ID NO: 112817 - DNA, 44 bp, Artificial Sequence
  primer
gtaaaacgacggccagttgtttaaagtgtttctataatcagggc

SEQ ID NO: 112818 - DNA, 35 bp, Artificial Sequence
  primer
gtaaaacgacggccagtgtggtggccacacagtcc

SEQ ID NO: 112819 - DNA, 21 bp, Artificial Sequence
  primer
ttcctaacacatggaaggtgc

SEQ ID NO: 112820 - DNA, 38 bp, Artificial Sequence
  primer
gtaaaacgacggccagtgagtcctgcatcttctcaggg

SEQ ID NO: 112821 - DNA, 38 bp, Artificial Sequence
  primer
gtaaaacgacggccagtagtcgccagagtccagtcaac

SEQ ID NO: 112822 - DNA, 21 bp, Artificial Sequence
  primer
tcagacattgcttgcttggag

SEQ ID NO: 112823 - DNA, 20 bp, Artificial Sequence
  primer
ctgtagctgccctgcttctc

SEQ ID NO: 112824 - DNA, 18 bp, Artificial Sequence
  primer
gcttgaggcctggagagg

SEQ ID NO: 112825 - DNA, 21 bp, Artificial Sequence
  primer
ccttctgtggaagagactggc

SEQ ID NO: 112826 - DNA, 38 bp, Artificial Sequence
  primer
gtaaaacgacggccagtagcctttgtcctgaccttcac

SEQ ID NO: 112827 - DNA, 20 bp, Artificial Sequence
  primer
acatccatggctgcagtagg

SEQ ID NO: 112828 - DNA, 21 bp, Artificial Sequence
  primer
aggctgaagcaggtcacagac

SEQ ID NO: 112829 - DNA, 38 bp, Artificial Sequence
  primer
gtaaaacgacggccagtcgaagcttctctggaggagag

SEQ ID NO: 112830 - DNA, 18 bp, Artificial Sequence
  primer
aagagccgctccttcacc

SEQ ID NO: 112831 - DNA, 38 bp, Artificial Sequence
  primer
gtaaaacgacggccagtagtccttggaatcactcagcc

SEQ ID NO: 112832 - DNA, 38 bp, Artificial Sequence
  primer
gtaaaacgacggccagtatacacacagcactggcaacc

SEQ ID NO: 112833 - DNA, 21 bp, Artificial Sequence
  primer
ccacagggtcagagatggaac

SEQ ID NO: 112834 - DNA, 21 bp, Artificial Sequence
  primer
tagtggaagagcttgttggcg

SEQ ID NO: 112835 - DNA, 19 bp, Artificial Sequence
  primer
ggaagaccctgagctgcac

SEQ ID NO: 112836 - DNA, 38 bp, Artificial Sequence
  primer
gtaaaacgacggccagtgtagcagtcgctgacatcctg

SEQ ID NO: 112837 - DNA, 21 bp, Artificial Sequence
  primer
aacacctgtgatctggaaggc

SEQ ID NO: 112838 - DNA, 21 bp, Artificial Sequence
  primer
acacatacacacacgtgctcc

SEQ ID NO: 112839 - DNA, 36 bp, Artificial Sequence
  primer
gtaaaacgacggccagtctcgaggcacagacagcac

SEQ ID NO: 112840 - DNA, 35 bp, Artificial Sequence
  primer
gtaaaacgacggccagtcaggcgatgagggaactg

SEQ ID NO: 112841 - DNA, 21 bp, Artificial Sequence
  primer
cgaaatacaggttcctcctgc

SEQ ID NO: 112842 - DNA, 21 bp, Artificial Sequence
  primer
tgaccgtagtcctcgtagctg

SEQ ID NO: 112843 - DNA, 37 bp, Artificial Sequence
  primer
gtaaaacgacggccagtacgtcggtcaggctgatctc

SEQ ID NO: 112844 - DNA, 20 bp, Artificial Sequence
  primer
aactctctgaggctgcaagg

SEQ ID NO: 112845 - DNA, 21 bp, Artificial Sequence
  primer
gctagaaacagcctaggccac

SEQ ID NO: 112846 - DNA, 21 bp, Artificial Sequence
  primer
ctgaacagacctcaggcttgg

SEQ ID NO: 112847 - DNA, 20 bp, Artificial Sequence
  primer
tccctcagagtcccaagagg

SEQ ID NO: 112848 - DNA, 38 bp, Artificial Sequence
  primer
gtaaaacgacggccagtggtagggaaggcagagatgtg

SEQ ID NO: 112849 - DNA, 20 bp, Artificial Sequence
  primer
tgggttcagaccctgacttg

SEQ ID NO: 112850 - DNA, 20 bp, Artificial Sequence
  primer
tgggtgacaaagcaagatcc

SEQ ID NO: 112851 - DNA, 38 bp, Artificial Sequence
  primer
gtaaaacgacggccagtccttctcactacccatggagc

SEQ ID NO: 112852 - DNA, 37 bp, Artificial Sequence
  primer
gtaaaacgacggccagtggtgttcccaacctccaaag

SEQ ID NO: 112853 - DNA, 38 bp, Artificial Sequence
  primer
gtaaaacgacggccagtgtctcatggctctggtttctg

SEQ ID NO: 112854 - DNA, 21 bp, Artificial Sequence
  primer
ctgcttccctctatctcctgg

SEQ ID NO: 112855 - DNA, 37 bp, Artificial Sequence
  primer
gtaaaacgacggccagtcacaggaggtccgtgatttg

SEQ ID NO: 112856 - DNA, 38 bp, Artificial Sequence
  primer
gtaaaacgacggccagtaagtccattctttgggtttgg

SEQ ID NO: 112857 - DNA, 21 bp, Artificial Sequence
  primer
ggacgtctctaaggatggcac

SEQ ID NO: 112858 - DNA, 21 bp, Artificial Sequence
  primer
ttgtgaggtggacctagttgg

SEQ ID NO: 112859 - DNA, 21 bp, Artificial Sequence
  primer
tgccattgcttccctctattc

SEQ ID NO: 112860 - DNA, 20 bp, Artificial Sequence
  primer
tgaggaacccatcactggtc

SEQ ID NO: 112861 - DNA, 37 bp, Artificial Sequence
  primer
gtaaaacgacggccagtgctgttgcagacctctctgg

SEQ ID NO: 112862 - DNA, 20 bp, Artificial Sequence
  primer
acacagaggccagcaatgac

SEQ ID NO: 112863 - DNA, 38 bp, Artificial Sequence
  primer
gtaaaacgacggccagtatgtatgctggttcctgccac

SEQ ID NO: 112864 - DNA, 20 bp, Artificial Sequence
  primer
cattggtgcccttggatatg

SEQ ID NO: 112865 - DNA, 21 bp, Artificial Sequence
  primer
ctcccaagtggctggaataag

SEQ ID NO: 112866 - DNA, 38 bp, Artificial Sequence
  primer
gtaaaacgacggccagtgttacctgggaggatgaggtg

SEQ ID NO: 112867 - DNA, 21 bp, Artificial Sequence
  primer
accgcatggtatcaataaccg

SEQ ID NO: 112868 - DNA, 21 bp, Artificial Sequence
  primer
cacaagcctgtgaggtagtgg

SEQ ID NO: 112869 - DNA, 21 bp, Artificial Sequence
  primer
tcctccagagccaggtacttc

SEQ ID NO: 112870 - DNA, 38 bp, Artificial Sequence
  primer
gtaaaacgacggccagttctgtgtaaacaggcattggc

SEQ ID NO: 112871 - DNA, 38 bp, Artificial Sequence
  primer
gtaaaacgacggccagttccaaagagccatctgtaggg

SEQ ID NO: 112872 - DNA, 38 bp, Artificial Sequence
  primer
gtaaaacgacggccagtatgagacagctctggtctgga

SEQ ID NO: 112873 - DNA, 21 bp, Artificial Sequence
  primer
gcaggagtgtcttcttgtccc

SEQ ID NO: 112874 - DNA, 35 bp, Artificial Sequence
  primer
gtaaaacgacggccagtgccgatgatgctgagagc

SEQ ID NO: 112875 - DNA, 38 bp, Artificial Sequence
  primer
gtaaaacgacggccagtgttgagttgcggttattgcag

SEQ ID NO: 112876 - DNA, 38 bp, Artificial Sequence
  primer
gtaaaacgacggccagttctgcttggttgtcagtacgc

SEQ ID NO: 112877 - DNA, 21 bp, Artificial Sequence
  primer
aaccagacactttgccaggac

SEQ ID NO: 112878 - DNA, 35 bp, Artificial Sequence
  primer
gtaaaacgacggccagtttgtccgggcaagaggac

SEQ ID NO: 112879 - DNA, 38 bp, Artificial Sequence
  primer
gtaaaacgacggccagtggaatctcactcaaacctggg

SEQ ID NO: 112880 - DNA, 21 bp, Artificial Sequence
  primer
gagtggtggaatgcttcactg

SEQ ID NO: 112881 - DNA, 37 bp, Artificial Sequence
  primer
gtaaaacgacggccagtctgcccatccatctcaaatc

SEQ ID NO: 112882 - DNA, 21 bp, Artificial Sequence
  primer
aaacctcagccaggtcttctg

SEQ ID NO: 112883 - DNA, 38 bp, Artificial Sequence
  primer
gtaaaacgacggccagtgacagctgcttgctacagtgg

SEQ ID NO: 112884 - DNA, 38 bp, Artificial Sequence
  primer
gtaaaacgacggccagtctagctgctctggctctctcc

SEQ ID NO: 112885 - DNA, 38 bp, Artificial Sequence
  primer
gtaaaacgacggccagtgtcccagtgacaggaaaggag

SEQ ID NO: 112886 - DNA, 38 bp, Artificial Sequence
  primer
gtaaaacgacggccagtgagctgcaggttcttcctctg

SEQ ID NO: 112887 - DNA, 37 bp, Artificial Sequence
  primer
gtaaaacgacggccagtctctcccactgggtttaggc

SEQ ID NO: 112888 - DNA, 20 bp, Artificial Sequence
  primer
atcctgccttctcctttccc

SEQ ID NO: 112889 - DNA, 38 bp, Artificial Sequence
  primer
gtaaaacgacggccagtcaggcactttgcaactcgtag

SEQ ID NO: 112890 - DNA, 38 bp, Artificial Sequence
  primer
gtaaaacgacggccagtggagaatccacattgaccatc

SEQ ID NO: 112891 - DNA, 38 bp, Artificial Sequence
  primer
gtaaaacgacggccagtttccagaaggccttatcctcc

SEQ ID NO: 112892 - DNA, 38 bp, Artificial Sequence
  primer
gtaaaacgacggccagtaccctggacttgaatcccaac

SEQ ID NO: 112893 - DNA, 38 bp, Artificial Sequence
  primer
gtaaaacgacggccagtttcaaagcaaggagaccaatg

SEQ ID NO: 112894 - DNA, 38 bp, Artificial Sequence
  primer
gtaaaacgacggccagtactcctcggccaaagatacag

SEQ ID NO: 112895 - DNA, 40 bp, Artificial Sequence
  primer
gtaaaacgacggccagtggagctgctttctttacaccttc

SEQ ID NO: 112896 - DNA, 40 bp, Artificial Sequence
  primer
gtaaaacgacggccagtgcacagcaataaggagctaattc

SEQ ID NO: 112897 - DNA, 40 bp, Artificial Sequence
  primer
gtaaaacgacggccagttggaattagggactcttcacacc

SEQ ID NO: 112898 - DNA, 38 bp, Artificial Sequence
  primer
gtaaaacgacggccagtgagcaaacagctaaccacagg

SEQ ID NO: 112899 - DNA, 38 bp, Artificial Sequence
  primer
gtaaaacgacggccagtggtaaggctggctgacaacac

SEQ ID NO: 112900 - DNA, 38 bp, Artificial Sequence
  primer
gtaaaacgacggccagtctcgacgttcgtgatcctttc

SEQ ID NO: 112901 - DNA, 38 bp, Artificial Sequence
  primer
gtaaaacgacggccagtctctcctttctcactgggtcg

SEQ ID NO: 112902 - DNA, 38 bp, Artificial Sequence
  primer
gtaaaacgacggccagttttcttcattgttccgctttg

SEQ ID NO: 112903 - DNA, 38 bp, Artificial Sequence
  primer
gtaaaacgacggccagtaaatgccctccaaactactgg

SEQ ID NO: 112904 - DNA, 21 bp, Artificial Sequence
  primer
tcccaacaagaagacatttgg

SEQ ID NO: 112905 - DNA, 37 bp, Artificial Sequence
  primer
gtaaaacgacggccagtctcaggagatgctgagcctg

SEQ ID NO: 112906 - DNA, 21 bp, Artificial Sequence
  primer
agcctctatcagtcaccctcc

SEQ ID NO: 112907 - DNA, 21 bp, Artificial Sequence
  primer
gcttatgcttccagagttggg

SEQ ID NO: 112908 - DNA, 20 bp, Artificial Sequence
  primer
tcacctagggagtgagccag

SEQ ID NO: 112909 - DNA, 19 bp, Artificial Sequence
  primer
ggctccagcttcacagcag

SEQ ID NO: 112910 - DNA, 38 bp, Artificial Sequence
  primer
gtaaaacgacggccagtatttcccatctaggtcctccc

SEQ ID NO: 112911 - DNA, 38 bp, Artificial Sequence
  primer
gtaaaacgacggccagtggcagagctattggtgtgaac

SEQ ID NO: 112912 - DNA, 36 bp, Artificial Sequence
  primer
gtaaaacgacggccagtagctagagtcggagcggtg

SEQ ID NO: 112913 - DNA, 21 bp, Artificial Sequence
  primer
acagagcatcagacccagacc

SEQ ID NO: 112914 - DNA, 21 bp, Artificial Sequence
  primer
aacaacccttatggttacccg

SEQ ID NO: 112915 - DNA, 38 bp, Artificial Sequence
  primer
gtaaaacgacggccagtatcctcagaagcctagcccag

SEQ ID NO: 112916 - DNA, 38 bp, Artificial Sequence
  primer
gtaaaacgacggccagtgggacagaggtggagtctgag

SEQ ID NO: 112917 - DNA, 20 bp, Artificial Sequence
  primer
atggtcttggtcaccacctg

SEQ ID NO: 112918 - DNA, 21 bp, Artificial Sequence
  primer
aaacacctttccacaggcttc

SEQ ID NO: 112919 - DNA, 21 bp, Artificial Sequence
  primer
ctgagaaagcacatgcaatga

SEQ ID NO: 112920 - DNA, 21 bp, Artificial Sequence
  primer
atgcctcctacattggcactt

SEQ ID NO: 112921 - DNA, 28 bp, Artificial Sequence
  primer
tcttagggtagaatatttgtaaagcaga

SEQ ID NO: 112922 - DNA, 21 bp, Artificial Sequence
  primer
tcgacagattctggtggagtg

SEQ ID NO: 112923 - DNA, 26 bp, Artificial Sequence
  primer
cctctggtcaaatcttaattctatca

SEQ ID NO: 112924 - DNA, 39 bp, Artificial Sequence
  primer
gtaaaacgacggccagtttatggagcctgttgccatatc

SEQ ID NO: 112925 - DNA, 40 bp, Artificial Sequence
  primer
gtaaaacgacggccagtgcctctcaaatattatggcttgc

SEQ ID NO: 112926 - DNA, 21 bp, Artificial Sequence
  primer
accacacaaaggctatcaggc

SEQ ID NO: 112927 - DNA, 42 bp, Artificial Sequence
  primer
gtaaaacgacggccagtaaatcgtccaaagaaccaaataaag

SEQ ID NO: 112928 - DNA, 21 bp, Artificial Sequence
  primer
agtcgttgggtcttgatcagc

SEQ ID NO: 112929 - DNA, 36 bp, Artificial Sequence
  primer
gtaaaacgacggccagtcaccgttgtggcattgttc

SEQ ID NO: 112930 - DNA, 21 bp, Artificial Sequence
  primer
tcctgttgaaagccacatagc

SEQ ID NO: 112931 - DNA, 40 bp, Artificial Sequence
  primer
gtaaaacgacggccagtaatctggaaatgccaatataccc

SEQ ID NO: 112932 - DNA, 37 bp, Artificial Sequence
  primer
gtaaaacgacggccagtaagtgtctccatcattgccg

SEQ ID NO: 112933 - DNA, 38 bp, Artificial Sequence
  primer
gtaaaacgacggccagttacctgcatttgctccatctg

SEQ ID NO: 112934 - DNA, 39 bp, Artificial Sequence
  primer
gtaaaacgacggccagtgctcacaagcctgtatttcctg

SEQ ID NO: 112935 - DNA, 22 bp, Artificial Sequence
  primer
ggcaagacatggacctaaacag

SEQ ID NO: 112936 - DNA, 40 bp, Artificial Sequence
  primer
gtaaaacgacggccagtacctaatggtgtcaagcataggg

SEQ ID NO: 112937 - DNA, 21 bp, Artificial Sequence
  primer
tagttccaggccagaaacagc

SEQ ID NO: 112938 - DNA, 21 bp, Artificial Sequence
  primer
atgactgctttgggattctcc

SEQ ID NO: 112939 - DNA, 22 bp, Artificial Sequence
  primer
gtcacacaggtaagtgagcagg

SEQ ID NO: 112940 - DNA, 38 bp, Artificial Sequence
  primer
gtaaaacgacggccagtagccaagaattcacgtatccc

SEQ ID NO: 112941 - DNA, 21 bp, Artificial Sequence
  primer
tccctaacactgagcaacctg

SEQ ID NO: 112942 - DNA, 38 bp, Artificial Sequence
  primer
gtaaaacgacggccagtctttccctttcaaacactggg

SEQ ID NO: 112943 - DNA, 39 bp, Artificial Sequence
  primer
gtaaaacgacggccagtccacaagaatatgggaaagcag

SEQ ID NO: 112944 - DNA, 21 bp, Artificial Sequence
  primer
gagaatgtcagggcagaaacc

SEQ ID NO: 112945 - DNA, 38 bp, Artificial Sequence
  primer
gtaaaacgacggccagttaaccaggtttgctccctgag

SEQ ID NO: 112946 - DNA, 38 bp, Artificial Sequence
  primer
gtaaaacgacggccagttctaggtggaaggcaaacacc

SEQ ID NO: 112947 - DNA, 22 bp, Artificial Sequence
  primer
gaactctcatatcctcccaggc

SEQ ID NO: 112948 - DNA, 39 bp, Artificial Sequence
  primer
gtaaaacgacggccagttgaacattccttagtgtcaggc

SEQ ID NO: 112949 - DNA, 21 bp, Artificial Sequence
  primer
gtctccattcccagattccac

SEQ ID NO: 112950 - DNA, 21 bp, Artificial Sequence
  primer
taaacgggcttgaggttgatg

SEQ ID NO: 112951 - DNA, 21 bp, Artificial Sequence
  primer
gtgtctctccaagtcgctgtg

SEQ ID NO: 112952 - DNA, 38 bp, Artificial Sequence
  primer
gtaaaacgacggccagttcttcacttgacttgcttgcc

SEQ ID NO: 112953 - DNA, 21 bp, Artificial Sequence
  primer
aaacgctcagggtgttctttc

SEQ ID NO: 112954 - DNA, 21 bp, Artificial Sequence
  primer
agcacattcccttggtattgg

SEQ ID NO: 112955 - DNA, 38 bp, Artificial Sequence
  primer
gtaaaacgacggccagtgttgaggcactcctgacactg

SEQ ID NO: 112956 - DNA, 40 bp, Artificial Sequence
  primer
gtaaaacgacggccagtcagaggatgcacctgttagtcac

SEQ ID NO: 112957 - DNA, 38 bp, Artificial Sequence
  primer
gtaaaacgacggccagtcaagtccaccttctctcctgc

SEQ ID NO: 112958 - DNA, 38 bp, Artificial Sequence
  primer
gtaaaacgacggccagtctgcctgtgtctgagaccatc

SEQ ID NO: 112959 - DNA, 21 bp, Artificial Sequence
  primer
ctaccctggcttgtcagtagc

SEQ ID NO: 112960 - DNA, 38 bp, Artificial Sequence
  primer
gtaaaacgacggccagtggttcgctgaagtggttacag

SEQ ID NO: 112961 - DNA, 39 bp, Artificial Sequence
  primer
gtaaaacgacggccagtggaaatttatcccaggaaggag

SEQ ID NO: 112962 - DNA, 21 bp, Artificial Sequence
  primer
ctacctgctggtgctgtttcc

SEQ ID NO: 112963 - DNA, 38 bp, Artificial Sequence
  primer
gtaaaacgacggccagtgagaggtggctccagtaggct

SEQ ID NO: 112964 - DNA, 21 bp, Artificial Sequence
  primer
cccatgttagtagccagagcc

SEQ ID NO: 112965 - DNA, 21 bp, Artificial Sequence
  primer
gtacctgaacccatgctcctc

SEQ ID NO: 112966 - DNA, 37 bp, Artificial Sequence
  primer
gtaaaacgacggccagtaaggacccagtgagaccagg

SEQ ID NO: 112967 - DNA, 21 bp, Artificial Sequence
  primer
gcccttccgtcagacacatac

SEQ ID NO: 112968 - DNA, 21 bp, Artificial Sequence
  primer
gacccgacgcatttattgaag

SEQ ID NO: 112969 - DNA, 21 bp, Artificial Sequence
  primer
ctggaaaggaaacccaactcc

SEQ ID NO: 112970 - DNA, 38 bp, Artificial Sequence
  primer
gtaaaacgacggccagtgagggtcttgcttgtgtgtcc

SEQ ID NO: 112971 - DNA, 38 bp, Artificial Sequence
  primer
gtaaaacgacggccagtgtgtgaggaagctgcccttag

SEQ ID NO: 112972 - DNA, 38 bp, Artificial Sequence
  primer
gtaaaacgacggccagtgacccaggtagtagggatggg

SEQ ID NO: 112973 - DNA, 21 bp, Artificial Sequence
  primer
actgctctttaatgcaccgag

SEQ ID NO: 112974 - DNA, 19 bp, Artificial Sequence
  primer
ccagccaagagaaagcctg

SEQ ID NO: 112975 - DNA, 20 bp, Artificial Sequence
  primer
aggccatcagagaatgggag

SEQ ID NO: 112976 - DNA, 38 bp, Artificial Sequence
  primer
gtaaaacgacggccagtgtggtcaagcaggttctttcc

SEQ ID NO: 112977 - DNA, 36 bp, Artificial Sequence
  primer
gtaaaacgacggccagtctgcacatggcaagtctgg

SEQ ID NO: 112978 - DNA, 20 bp, Artificial Sequence
  primer
cctatcctctgccctcttgg

SEQ ID NO: 112979 - DNA, 21 bp, Artificial Sequence
  primer
actcctgggctcaagcaatac

SEQ ID NO: 112980 - DNA, 20 bp, Artificial Sequence
  primer
acaccaaaggcacacctcag

SEQ ID NO: 112981 - DNA, 38 bp, Artificial Sequence
  primer
gtaaaacgacggccagtgcagaaagctccatgaacatc

SEQ ID NO: 112982 - DNA, 21 bp, Artificial Sequence
  primer
tcttcacagacagcaagcagc

SEQ ID NO: 112983 - DNA, 21 bp, Artificial Sequence
  primer
gtgccctggagtcatacaatg

SEQ ID NO: 112984 - DNA, 20 bp, Artificial Sequence
  primer
ctccggcttcactgtcacac

SEQ ID NO: 112985 - DNA, 21 bp, Artificial Sequence
  primer
agagggccatgtctttgtcac

SEQ ID NO: 112986 - DNA, 37 bp, Artificial Sequence
  primer
gtaaaacgacggccagtggtagggactggtcagaggg

SEQ ID NO: 112987 - DNA, 20 bp, Artificial Sequence
  primer
atctctgcctctgtccctcc

SEQ ID NO: 112988 - DNA, 21 bp, Artificial Sequence
  primer
ggtgggatggagtagaatggg

SEQ ID NO: 112989 - DNA, 21 bp, Artificial Sequence
  primer
gagagagaaggccaaggtctg

SEQ ID NO: 112990 - DNA, 38 bp, Artificial Sequence
  primer
gtaaaacgacggccagttaatctcttagggcaggctgg

SEQ ID NO: 112991 - DNA, 37 bp, Artificial Sequence
  primer
gtaaaacgacggccagtaggtctctctgggagcaagc

SEQ ID NO: 112992 - DNA, 18 bp, Artificial Sequence
  primer
caccatgggttgggtctg

SEQ ID NO: 112993 - DNA, 21 bp, Artificial Sequence
  primer
tcaagaaaggaagagtgctgg

SEQ ID NO: 112994 - DNA, 21 bp, Artificial Sequence
  primer
tctatctcctccttgcccaac

SEQ ID NO: 112995 - DNA, 38 bp, Artificial Sequence
  primer
gtaaaacgacggccagtccacagaggccttaagctacc

SEQ ID NO: 112996 - DNA, 38 bp, Artificial Sequence
  primer
gtaaaacgacggccagtgtggagtacctctgcttgctg

SEQ ID NO: 112997 - DNA, 20 bp, Artificial Sequence
  primer
ctgccatccttccctctcag

SEQ ID NO: 112998 - DNA, 21 bp, Artificial Sequence
  primer
taaacccagacctcttgaccc

SEQ ID NO: 112999 - DNA, 38 bp, Artificial Sequence
  primer
gtaaaacgacggccagttaggcttgattccactggacc

SEQ ID NO: 113000 - DNA, 38 bp, Artificial Sequence
  primer
gtaaaacgacggccagtttctcaatcacatccagccac

SEQ ID NO: 113001 - DNA, 21 bp, Artificial Sequence
  primer
tcctttgacatggcttgacac

SEQ ID NO: 113002 - DNA, 20 bp, Artificial Sequence
  primer
agcaagaacaaggaggaggg

SEQ ID NO: 113003 - DNA, 21 bp, Artificial Sequence
  primer
atgagaagagggccaagtcag

SEQ ID NO: 113004 - DNA, 38 bp, Artificial Sequence
  primer
gtaaaacgacggccagtccatggaccaccagaaatatg

SEQ ID NO: 113005 - DNA, 38 bp, Artificial Sequence
  primer
gtaaaacgacggccagtcacctgcacagagaggaaatg

SEQ ID NO: 113006 - DNA, 36 bp, Artificial Sequence
  primer
gtaaaacgacggccagtctcagcagtgaccacaggc

SEQ ID NO: 113007 - DNA, 21 bp, Artificial Sequence
  primer
gtcagaagtaagcgtcctgcc

SEQ ID NO: 113008 - DNA, 38 bp, Artificial Sequence
  primer
gtaaaacgacggccagtacagcctgacaaggtgctagg

SEQ ID NO: 113009 - DNA, 20 bp, Artificial Sequence
  primer
gttcagcacaaccttcgagc

SEQ ID NO: 113010 - DNA, 35 bp, Artificial Sequence
  primer
gtaaaacgacggccagtgaggcacagctgggttcc

SEQ ID NO: 113011 - DNA, 20 bp, Artificial Sequence
  primer
tcttgagcgtgtccctgaac

SEQ ID NO: 113012 - DNA, 19 bp, Artificial Sequence
  primer
ccctgagctggttcctgtg

SEQ ID NO: 113013 - DNA, 21 bp, Artificial Sequence
  primer
catttctgggcctttatctgg

SEQ ID NO: 113014 - DNA, 39 bp, Artificial Sequence
  primer
gtaaaacgacggccagttgcctctgagtctctatctggg

SEQ ID NO: 113015 - DNA, 38 bp, Artificial Sequence
  primer
gtaaaacgacggccagtggaaacaggcgtctctgtagg

SEQ ID NO: 113016 - DNA, 21 bp, Artificial Sequence
  primer
ctcggcctgtaagtccagaag

SEQ ID NO: 113017 - DNA, 20 bp, Artificial Sequence
  primer
cagaacagactggcccagag

SEQ ID NO: 113018 - DNA, 21 bp, Artificial Sequence
  primer
gccacctacttgactctgcac

SEQ ID NO: 113019 - DNA, 37 bp, Artificial Sequence
  primer
gtaaaacgacggccagtctggccctagcctgcactac

SEQ ID NO: 113020 - DNA, 21 bp, Artificial Sequence
  primer
ggtactgtcccagtgcctagc

SEQ ID NO: 113021 - DNA, 38 bp, Artificial Sequence
  primer
gtaaaacgacggccagtacttctcccatataacccggc

SEQ ID NO: 113022 - DNA, 38 bp, Artificial Sequence
  primer
gtaaaacgacggccagtcagccagtcctagaatgaggg

SEQ ID NO: 113023 - DNA, 38 bp, Artificial Sequence
  primer
gtaaaacgacggccagtgaaccttcctaacagccctgc

SEQ ID NO: 113024 - DNA, 21 bp, Artificial Sequence
  primer
gaacatacaggaaagggcctg

SEQ ID NO: 113025 - DNA, 21 bp, Artificial Sequence
  primer
aggtcagaacatcctggcttc

SEQ ID NO: 113026 - DNA, 38 bp, Artificial Sequence
  primer
gtaaaacgacggccagtagaacttcccagaccctggag

SEQ ID NO: 113027 - DNA, 38 bp, Artificial Sequence
  primer
gtaaaacgacggccagttgtcctgttgcctcaaggtag

SEQ ID NO: 113028 - DNA, 26 bp, Artificial Sequence
  primer
caatggaaactgcagaaataccttag

SEQ ID NO: 113029 - DNA, 38 bp, Artificial Sequence
  primer
gtaaaacgacggccagttttgatacccgtgagatgtcc

SEQ ID NO: 113030 - DNA, 21 bp, Artificial Sequence
  primer
acaataccagttggcatcctg

SEQ ID NO: 113031 - DNA, 21 bp, Artificial Sequence
  primer
cctctctttctctcagctgcc

SEQ ID NO: 113032 - DNA, 38 bp, Artificial Sequence
  primer
gtaaaacgacggccagtttggacacggttactggtttc

SEQ ID NO: 113033 - DNA, 37 bp, Artificial Sequence
  primer
gtaaaacgacggccagtagctcccactggaagagagg

SEQ ID NO: 113034 - DNA, 21 bp, Artificial Sequence
  primer
gcccttgttggctagtgaatc

SEQ ID NO: 113035 - DNA, 38 bp, Artificial Sequence
  primer
gtaaaacgacggccagttggaatgtcaaacgtggagac

SEQ ID NO: 113036 - DNA, 21 bp, Artificial Sequence
  primer
atctttgaggtgcctttctgg

SEQ ID NO: 113037 - DNA, 39 bp, Artificial Sequence
  primer
gtaaaacgacggccagttgacatgcaagaacctttagcc

SEQ ID NO: 113038 - DNA, 19 bp, Artificial Sequence
  primer
aggcattcctgccacagtc

SEQ ID NO: 113039 - DNA, 37 bp, Artificial Sequence
  primer
gtaaaacgacggccagtcacttgaacccaagaggcag

SEQ ID NO: 113040 - DNA, 39 bp, Artificial Sequence
  primer
gtaaaacgacggccagtttgctcttagctttccttgctc

SEQ ID NO: 113041 - DNA, 21 bp, Artificial Sequence
  primer
gggagcatgggatcctttaac

SEQ ID NO: 113042 - DNA, 21 bp, Artificial Sequence
  primer
acaccacatacattcaaggcg

SEQ ID NO: 113043 - DNA, 21 bp, Artificial Sequence
  primer
aatatctcccaccctgaaccc

SEQ ID NO: 113044 - DNA, 20 bp, Artificial Sequence
  primer
caagccagcaagttctccac

SEQ ID NO: 113045 - DNA, 38 bp, Artificial Sequence
  primer
gtaaaacgacggccagttatgaaagggactcctgcacc

SEQ ID NO: 113046 - DNA, 21 bp, Artificial Sequence
  primer
ttatgctaccacattccagcc

SEQ ID NO: 113047 - DNA, 21 bp, Artificial Sequence
  primer
acaaatacaaacgggtctggc

SEQ ID NO: 113048 - DNA, 40 bp, Artificial Sequence
  primer
gtaaaacgacggccagtaaacaaatgcttactggctctcc

SEQ ID NO: 113049 - DNA, 41 bp, Artificial Sequence
  primer
gtaaaacgacggccagtgccttacaattcctgtgcagatag

SEQ ID NO: 113050 - DNA, 21 bp, Artificial Sequence
  primer
acagcaccatccattatcagg

SEQ ID NO: 113051 - DNA, 38 bp, Artificial Sequence
  primer
gtaaaacgacggccagttcttgcactgaatagggatgg

SEQ ID NO: 113052 - DNA, 39 bp, Artificial Sequence
  primer
gtaaaacgacggccagttccagtttgtctactggttggg

SEQ ID NO: 113053 - DNA, 38 bp, Artificial Sequence
  primer
gtaaaacgacggccagtgggaacacccatgtaacctcc

SEQ ID NO: 113054 - DNA, 38 bp, Artificial Sequence
  primer
gtaaaacgacggccagtgactggaatgcttcttcccac

SEQ ID NO: 113055 - DNA, 38 bp, Artificial Sequence
  primer
gtaaaacgacggccagtctccacctgtaaacccactcc

SEQ ID NO: 113056 - DNA, 18 bp, Artificial Sequence
  primer
tgagaggtggaggttgcg

SEQ ID NO: 113057 - DNA, 21 bp, Artificial Sequence
  primer
cttccctacaatctgcatccc

SEQ ID NO: 113058 - DNA, 21 bp, Artificial Sequence
  primer
catccataaattcggcaacag

SEQ ID NO: 113059 - DNA, 38 bp, Artificial Sequence
  primer
gtaaaacgacggccagtctcagcagcccttaaccactc

SEQ ID NO: 113060 - DNA, 24 bp, Artificial Sequence
  primer
ctcagttaagacaagtgacccaaa

SEQ ID NO: 113061 - DNA, 38 bp, Artificial Sequence
  primer
gtaaaacgacggccagtctgaaccacagggaaacttgg

SEQ ID NO: 113062 - DNA, 21 bp, Artificial Sequence
  primer
gcttccaggtgtgttagaggc

SEQ ID NO: 113063 - DNA, 21 bp, Artificial Sequence
  primer
ctgggaatatggcatcacacc

SEQ ID NO: 113064 - DNA, 39 bp, Artificial Sequence
  primer
gtaaaacgacggccagtgagcaataccggtgtactctgc

SEQ ID NO: 113065 - DNA, 22 bp, Artificial Sequence
  primer
gaggtctgtagccttctgttgg

SEQ ID NO: 113066 - DNA, 20 bp, Artificial Sequence
  primer
atccatcacgtcctgacagc

SEQ ID NO: 113067 - DNA, 38 bp, Artificial Sequence
  primer
gtaaaacgacggccagtacaaacgtgtccataagcagc

SEQ ID NO: 113068 - DNA, 22 bp, Artificial Sequence
  primer
tgacttgaagctgtgcagaaag

SEQ ID NO: 113069 - DNA, 38 bp, Artificial Sequence
  primer
gtaaaacgacggccagttaggtccatccagcatcaatc

SEQ ID NO: 113070 - DNA, 21 bp, Artificial Sequence
  primer
gacttcctacttgaggcaccc

SEQ ID NO: 113071 - DNA, 38 bp, Artificial Sequence
  primer
gtaaaacgacggccagtttgtggtggtagtcacacagc

SEQ ID NO: 113072 - DNA, 22 bp, Artificial Sequence
  primer
tttcaaacaaccctaaagtccc

SEQ ID NO: 113073 - DNA, 38 bp, Artificial Sequence
  primer
gtaaaacgacggccagtgactgtctttgggatgggatg

SEQ ID NO: 113074 - DNA, 21 bp, Artificial Sequence
  primer
cttctcgaacttgaccttggg

SEQ ID NO: 113075 - DNA, 18 bp, Artificial Sequence
  primer
gctgaaggcgctgaggtc

SEQ ID NO: 113076 - DNA, 38 bp, Artificial Sequence
  primer
gtaaaacgacggccagttcaatctgcacgttgatgtcc

SEQ ID NO: 113077 - DNA, 38 bp, Artificial Sequence
  primer
gtaaaacgacggccagtcttgaagagcttgctgcagtg

SEQ ID NO: 113078 - DNA, 38 bp, Artificial Sequence
  primer
gtaaaacgacggccagtgtgcttgagcatgtggttctg

SEQ ID NO: 113079 - DNA, 40 bp, Artificial Sequence
  primer
gtaaaacgacggccagtgggactttggaaagtactggatg

SEQ ID NO: 113080 - DNA, 38 bp, Artificial Sequence
  primer
gtaaaacgacggccagtaagcccaggctaagtttcacc

SEQ ID NO: 113081 - DNA, 21 bp, Artificial Sequence
  primer
ctcctctaactgggcaggagg

SEQ ID NO: 113082 - DNA, 38 bp, Artificial Sequence
  primer
gtaaaacgacggccagtagtagcttgtttctcggctgc

SEQ ID NO: 113083 - DNA, 21 bp, Artificial Sequence
  primer
ccgtcggactagagaaaggag

SEQ ID NO: 113084 - DNA, 21 bp, Artificial Sequence
  primer
acatacaggcgaattcacagc

SEQ ID NO: 113085 - DNA, 21 bp, Artificial Sequence
  primer
tttgcttctctaggcctctcg

SEQ ID NO: 113086 - DNA, 40 bp, Artificial Sequence
  primer
gtaaaacgacggccagtgacttctacaccagaaacgatcc

SEQ ID NO: 113087 - DNA, 38 bp, Artificial Sequence
  primer
gtaaaacgacggccagtccttggagatccattcacacc

SEQ ID NO: 113088 - DNA, 38 bp, Artificial Sequence
  primer
gtaaaacgacggccagtcttcattctgacaaactgggc

SEQ ID NO: 113089 - DNA, 21 bp, Artificial Sequence
  primer
cctgactggctgacatagcac

SEQ ID NO: 113090 - DNA, 22 bp, Artificial Sequence
  primer
gctcttcagaaggatggctgtc

SEQ ID NO: 113091 - DNA, 20 bp, Artificial Sequence
  primer
gccttctgtggattgctgag

SEQ ID NO: 113092 - DNA, 21 bp, Artificial Sequence
  primer
cctgagccagtatctgcactg

SEQ ID NO: 113093 - DNA, 22 bp, Artificial Sequence
  primer
aaattgtgcttctttcccttcc

SEQ ID NO: 113094 - DNA, 20 bp, Artificial Sequence
  primer
cacaggaacctgctgcaatg

SEQ ID NO: 113095 - DNA, 40 bp, Artificial Sequence
  primer
gtaaaacgacggccagtttccctgaaagttcaatctcaaa

SEQ ID NO: 113096 - DNA, 38 bp, Artificial Sequence
  primer
gtaaaacgacggccagtttcatggtaaccgcttgtttg

SEQ ID NO: 113097 - DNA, 37 bp, Artificial Sequence
  primer
gtaaaacgacggccagtcactgtcctggccgatactg

SEQ ID NO: 113098 - DNA, 22 bp, Artificial Sequence
  primer
cattccagggaagattagcaag

SEQ ID NO: 113099 - DNA, 21 bp, Artificial Sequence
  primer
tcacttgaagggaagggattg

SEQ ID NO: 113100 - DNA, 38 bp, Artificial Sequence
  primer
gtaaaacgacggccagtaatttcatgtccatgtggtgc

SEQ ID NO: 113101 - DNA, 38 bp, Artificial Sequence
  primer
gtaaaacgacggccagttttctgtgactcctccatcca

SEQ ID NO: 113102 - DNA, 21 bp, Artificial Sequence
  primer
aaattagtgccatctccagcc

SEQ ID NO: 113103 - DNA, 21 bp, Artificial Sequence
  primer
gactggaacagaaggaggcag

SEQ ID NO: 113104 - DNA, 38 bp, Artificial Sequence
  primer
gtaaaacgacggccagtaaagcccgaagctaggaactc

SEQ ID NO: 113105 - DNA, 21 bp, Artificial Sequence
  primer
cctgcctaggacagagtttgg

SEQ ID NO: 113106 - DNA, 20 bp, Artificial Sequence
  primer
cttcctgcacagaaaggctg

SEQ ID NO: 113107 - DNA, 38 bp, Artificial Sequence
  primer
gtaaaacgacggccagtttgtcacttgcgctgaagaag

SEQ ID NO: 113108 - DNA, 21 bp, Artificial Sequence
  primer
aaaggcctggatgtactcacg

SEQ ID NO: 113109 - DNA, 21 bp, Artificial Sequence
  primer
ttgccatgtctctgtcctagc

SEQ ID NO: 113110 - DNA, 38 bp, Artificial Sequence
  primer
gtaaaacgacggccagtgtctccgacagacaggacacc

SEQ ID NO: 113111 - DNA, 21 bp, Artificial Sequence
  primer
gactgcctgagacagaaaccc

SEQ ID NO: 113112 - DNA, 38 bp, Artificial Sequence
  primer
gtaaaacgacggccagtaggtgctctgtgagacattcg

SEQ ID NO: 113113 - DNA, 21 bp, Artificial Sequence
  primer
gtctcaacccatccacccttc

SEQ ID NO: 113114 - DNA, 38 bp, Artificial Sequence
  primer
gtaaaacgacggccagttccagaatccagagcatctcc

SEQ ID NO: 113115 - DNA, 20 bp, Artificial Sequence
  primer
gtgacacccgtgacaaggag

SEQ ID NO: 113116 - DNA, 38 bp, Artificial Sequence
  primer
gtaaaacgacggccagtgtccatgcttgaacttggagg

SEQ ID NO: 113117 - DNA, 20 bp, Artificial Sequence
  primer
acaagggcacctcctaccag

SEQ ID NO: 113118 - DNA, 20 bp, Artificial Sequence
  primer
gtcagcttctcccaggcttc

SEQ ID NO: 113119 - DNA, 38 bp, Artificial Sequence
  primer
gtaaaacgacggccagtcgccctggtctcaagtcatag

SEQ ID NO: 113120 - DNA, 36 bp, Artificial Sequence
  primer
gtaaaacgacggccagtctcgtggctctgggaagtc

SEQ ID NO: 113121 - DNA, 21 bp, Artificial Sequence
  primer
tgccagagaacagagcatttg

SEQ ID NO: 113122 - DNA, 21 bp, Artificial Sequence
  primer
aagcctgtcccgtgtctactg

SEQ ID NO: 113123 - DNA, 38 bp, Artificial Sequence
  primer
gtaaaacgacggccagtgcacaaactggcactacatgg

SEQ ID NO: 113124 - DNA, 22 bp, Artificial Sequence
  primer
gggttatctacgttctcctggg

SEQ ID NO: 113125 - DNA, 21 bp, Artificial Sequence
  primer
caaggcccagatggtctacag

SEQ ID NO: 113126 - DNA, 38 bp, Artificial Sequence
  primer
gtaaaacgacggccagtttgtagcgcatcagattcagg

SEQ ID NO: 113127 - DNA, 21 bp, Artificial Sequence
  primer
tgaaggacgctaggaatggtc

SEQ ID NO: 113128 - DNA, 21 bp, Artificial Sequence
  primer
ctggtcctcagtccttccatc

SEQ ID NO: 113129 - DNA, 24 bp, Artificial Sequence
  primer
catgatcccgtgatttatttactg

SEQ ID NO: 113130 - DNA, 39 bp, Artificial Sequence
  primer
gtaaaacgacggccagtaatttcaccatgcaaggatgtc

SEQ ID NO: 113131 - DNA, 18 bp, Artificial Sequence
  primer
aggcgtgagccactgaac

SEQ ID NO: 113132 - DNA, 25 bp, Artificial Sequence
  primer
gaactactgtgcagaatgagatgag

SEQ ID NO: 113133 - DNA, 21 bp, Artificial Sequence
  primer
gctcaagatgccactttgtgt

SEQ ID NO: 113134 - DNA, 22 bp, Artificial Sequence
  primer
ccaagtagacgactatgggaaa

SEQ ID NO: 113135 - DNA, 19 bp, Artificial Sequence
  primer
atggtgccactgccctcta

SEQ ID NO: 113136 - DNA, 38 bp, Artificial Sequence
  primer
gtaaaacgacggccagtgaggatgggaggtgttacagg

SEQ ID NO: 113137 - DNA, 23 bp, Artificial Sequence
  primer
gtgatagtggattctacccatgc

SEQ ID NO: 113138 - DNA, 20 bp, Artificial Sequence
  primer
gctcgacacaagcagtgagg

SEQ ID NO: 113139 - DNA, 21 bp, Artificial Sequence
  primer
aggacatacgatgcttccctg

SEQ ID NO: 113140 - DNA, 42 bp, Artificial Sequence
  primer
gtaaaacgacggccagtgcctgtacctttactgtacaagagg

SEQ ID NO: 113141 - DNA, 38 bp, Artificial Sequence
  primer
gtaaaacgacggccagttgaaggataggcatcaagctc

SEQ ID NO: 113142 - DNA, 44 bp, Artificial Sequence
  primer
gtaaaacgacggccagttttgtaatcaagtcttcacaaattcag

SEQ ID NO: 113143 - DNA, 38 bp, Artificial Sequence
  primer
gtaaaacgacggccagtccatctgcagctccataattc

SEQ ID NO: 113144 - DNA, 21 bp, Artificial Sequence
  primer
gaaaccagtacaaagggctgg

SEQ ID NO: 113145 - DNA, 21 bp, Artificial Sequence
  primer
agaaccttggagaatggaacg

SEQ ID NO: 113146 - DNA, 38 bp, Artificial Sequence
  primer
gtaaaacgacggccagtaggatccgtttggttcaagtg

SEQ ID NO: 113147 - DNA, 38 bp, Artificial Sequence
  primer
gtaaaacgacggccagtgagcctgccttgtatctttgg

SEQ ID NO: 113148 - DNA, 38 bp, Artificial Sequence
  primer
gtaaaacgacggccagtggagaacttgctgtctgggtc

SEQ ID NO: 113149 - DNA, 38 bp, Artificial Sequence
  primer
gtaaaacgacggccagtggaacacctcttggtcctttg

SEQ ID NO: 113150 - DNA, 38 bp, Artificial Sequence
  primer
gtaaaacgacggccagtttgccatgtttatccttcgtc

SEQ ID NO: 113151 - DNA, 21 bp, Artificial Sequence
  primer
ccttcaggtctccttcagtgg

SEQ ID NO: 113152 - DNA, 20 bp, Artificial Sequence
  primer
ctcactggatgtgggctctg

SEQ ID NO: 113153 - DNA, 38 bp, Artificial Sequence
  primer
gtaaaacgacggccagtgtggagtcaggcaaagtgatg

SEQ ID NO: 113154 - DNA, 21 bp, Artificial Sequence
  primer
caggtgcttgagttggttgag

SEQ ID NO: 113155 - DNA, 21 bp, Artificial Sequence
  primer
gatgtttgtttggcctcttcc

SEQ ID NO: 113156 - DNA, 38 bp, Artificial Sequence
  primer
gtaaaacgacggccagtcaggttggagttcctggaaag

SEQ ID NO: 113157 - DNA, 21 bp, Artificial Sequence
  primer
cagcttcttcctggtgaaatg

SEQ ID NO: 113158 - DNA, 21 bp, Artificial Sequence
  primer
gccctgacatatgctgtgttc

SEQ ID NO: 113159 - DNA, 38 bp, Artificial Sequence
  primer
gtaaaacgacggccagtagttaaatgcatcctggtcgg

SEQ ID NO: 113160 - DNA, 21 bp, Artificial Sequence
  primer
ttatttccggtttgttggtcc

SEQ ID NO: 113161 - DNA, 21 bp, Artificial Sequence
  primer
ctgggtggaagagaccatagg

SEQ ID NO: 113162 - DNA, 21 bp, Artificial Sequence
  primer
acacagtgtctgtctcagcgg

SEQ ID NO: 113163 - DNA, 38 bp, Artificial Sequence
  primer
gtaaaacgacggccagtattggatgctacgctggctac

SEQ ID NO: 113164 - DNA, 21 bp, Artificial Sequence
  primer
ctcctgtcagggaagatccag

SEQ ID NO: 113165 - DNA, 38 bp, Artificial Sequence
  primer
gtaaaacgacggccagtaacaaacaagttcccgtggag

SEQ ID NO: 113166 - DNA, 36 bp, Artificial Sequence
  primer
gtaaaacgacggccagtatgtagagcgtcccgttgg

SEQ ID NO: 113167 - DNA, 21 bp, Artificial Sequence
  primer
gatttacaggaagccacgcag

SEQ ID NO: 113168 - DNA, 38 bp, Artificial Sequence
  primer
gtaaaacgacggccagtcgactgcatgaaggagttcac

SEQ ID NO: 113169 - DNA, 38 bp, Artificial Sequence
  primer
gtaaaacgacggccagtaccgtcttcctatcctctccc

SEQ ID NO: 113170 - DNA, 38 bp, Artificial Sequence
  primer
gtaaaacgacggccagtgtcgtggaagatgggtttctc

SEQ ID NO: 113171 - DNA, 38 bp, Artificial Sequence
  primer
gtaaaacgacggccagtgctaatgtgtagcatgccgtc

SEQ ID NO: 113172 - DNA, 38 bp, Artificial Sequence
  primer
gtaaaacgacggccagttaactcccacgtgatgtcagc

SEQ ID NO: 113173 - DNA, 39 bp, Artificial Sequence
  primer
gtaaaacgacggccagtcacatttcagaagacgtggatg

SEQ ID NO: 113174 - DNA, 38 bp, Artificial Sequence
  primer
gtaaaacgacggccagtaacctcaacttgaaacccacc

SEQ ID NO: 113175 - DNA, 37 bp, Artificial Sequence
  primer
gtaaaacgacggccagtgtccgctgatacagctcgtc

SEQ ID NO: 113176 - DNA, 38 bp, Artificial Sequence
  primer
gtaaaacgacggccagtagaggaaagccaagtttgcag

SEQ ID NO: 113177 - DNA, 21 bp, Artificial Sequence
  primer
ccaccacgatctctagggaag

SEQ ID NO: 113178 - DNA, 21 bp, Artificial Sequence
  primer
tactcggccttcatgacacag

SEQ ID NO: 113179 - DNA, 23 bp, Artificial Sequence
  primer
gcaagataagtgccaaagggtag

SEQ ID NO: 113180 - DNA, 38 bp, Artificial Sequence; identical to SEQ ID NO: 113176
  primer

SEQ ID NO: 113181 - DNA, 21 bp, Artificial Sequence
  primer
caaattcggaaaccgagtgac

SEQ ID NO: 113182 - DNA, 38 bp, Artificial Sequence
  primer
gtaaaacgacggccagttttgaatggccactttccttc

SEQ ID NO: 113183 - DNA, 21 bp, Artificial Sequence
  primer
caacttcgcatacctgtgtca

SEQ ID NO: 113184 - DNA, 38 bp, Artificial Sequence
  primer
gtaaaacgacggccagtttctttggctccttctcaaac

SEQ ID NO: 113185 - DNA, 21 bp, Artificial Sequence
  primer
tcaaatcattaaggccttccc

SEQ ID NO: 113186 - DNA, 38 bp, Artificial Sequence
  primer
gtaaaacgacggccagtcaggtggcaagctagatttgg

SEQ ID NO: 113187 - DNA, 38 bp, Artificial Sequence
  primer
gtaaaacgacggccagttaatcaaagcttgggcactgg

SEQ ID NO: 113188 - DNA, 21 bp, Artificial Sequence
  primer
tttcaggtggagaagtcaagg

SEQ ID NO: 113189 - DNA, 21 bp, Artificial Sequence
  primer
ggaaggacaccaaggtctctg

SEQ ID NO: 113190 - DNA, 21 bp, Artificial Sequence
  primer
actaggcccagtgaggagagg

SEQ ID NO: 113191 - DNA, 39 bp, Artificial Sequence
  primer
gtaaaacgacggccagtaagtaggatcaagttgggcttt

SEQ ID NO: 113192 - DNA, 38 bp, Artificial Sequence
  primer
gtaaaacgacggccagtccattatcaaccctcaggctc

SEQ ID NO: 113193 - DNA, 36 bp, Artificial Sequence
  primer
gtaaaacgacggccagtacaacagccaacggagtgg

SEQ ID NO: 113194 - DNA, 21 bp, Artificial Sequence
  primer
ctcagatctgccattcctctg

SEQ ID NO: 113195 - DNA, 21 bp, Artificial Sequence
  primer
tgcatccatattctgactggg

SEQ ID NO: 113196 - DNA, 21 bp, Artificial Sequence
  primer
tacctgcccttcatcagaatc

SEQ ID NO: 113197 - DNA, 37 bp, Artificial Sequence
  primer
gtaaaacgacggccagtactgaacaccctcttcgctg

SEQ ID NO: 113198 - DNA, 38 bp, Artificial Sequence
  primer
gtaaaacgacggccagtctggtcacgttctaggtctgg

SEQ ID NO: 113199 - DNA, 38 bp, Artificial Sequence
  primer
gtaaaacgacggccagtaagttaccatggaaagcctgc

SEQ ID NO: 113200 - DNA, 38 bp, Artificial Sequence
  primer
gtaaaacgacggccagtacgggattaaatgggaccttc

SEQ ID NO: 113201 - DNA, 38 bp, Artificial Sequence
  primer
gtaaaacgacggccagttccaggatgatccataaaccc

SEQ ID NO: 113202 - DNA, 22 bp, Artificial Sequence
  primer
cggtgaattaagcctctcactc

SEQ ID NO: 113203 - DNA, 22 bp, Artificial Sequence
  primer
gcaaattccatttgtgtcaatg

SEQ ID NO: 113204 - DNA, 39 bp, Artificial Sequence
  primer
gtaaaacgacggccagtccaaacatttgctattccctcc

SEQ ID NO: 113205 - DNA, 27 bp, Artificial Sequence
  primer
ttacagtgcaaagtgttcaagattaag

SEQ ID NO: 113206 - DNA, 38 bp, Artificial Sequence
  primer
gtaaaacgacggccagtcatatgctggcactgttctca

SEQ ID NO: 113207 - DNA, 21 bp, Artificial Sequence
  primer
gttgcccaacactgaactacg

SEQ ID NO: 113208 - DNA, 21 bp, Artificial Sequence
  primer
ttgaatgccagctaagtgctc

SEQ ID NO: 113209 - DNA, 21 bp, Artificial Sequence
  primer
tcagtgccctttctaaggtcc

SEQ ID NO: 113210 - DNA, 39 bp, Artificial Sequence
  primer
gtaaaacgacggccagtaaatagctgaagttgcctgtgc

SEQ ID NO: 113211 - DNA, 38 bp, Artificial Sequence
  primer
gtaaaacgacggccagtctccctacacaagccagtcag

SEQ ID NO: 113212 - DNA, 38 bp, Artificial Sequence
  primer
gtaaaacgacggccagtcagccgtggagaacaactaac

SEQ ID NO: 113213 - DNA, 21 bp, Artificial Sequence
  primer
tgtaacacacgccagagcttc

SEQ ID NO: 113214 - DNA, 38 bp, Artificial Sequence
  primer
gtaaaacgacggccagttctgccatgggacagtatgtg

SEQ ID NO: 113215 - DNA, 39 bp, Artificial Sequence
  primer
gtaaaacgacggccagtaagtctccaagtacccagtccc

SEQ ID NO: 113216 - DNA, 38 bp, Artificial Sequence
  primer
gtaaaacgacggccagttttctggagtaaggctgggtc

SEQ ID NO: 113217 - DNA, 21 bp, Artificial Sequence
  primer
gctctgggtcagagacaggac

SEQ ID NO: 113218 - DNA, 21 bp, Artificial Sequence
  primer
tggatccagggtttctgtacc

SEQ ID NO: 113219 - DNA, 20 bp, Artificial Sequence
  primer
gtggagtaggtttcaggccc

SEQ ID NO: 113220 - DNA, 20 bp, Artificial Sequence
  primer
ctttcatgcaaccctcccag

SEQ ID NO: 113221 - DNA, 37 bp, Artificial Sequence
  primer
gtaaaacgacggccagtccttgctgtctgagacctcg

SEQ ID NO: 113222 - DNA, 38 bp, Artificial Sequence
  primer
gtaaaacgacggccagtgatacgtgggcttgtgtctcc

SEQ ID NO: 113223 - DNA, 38 bp, Artificial Sequence
  primer
gtaaaacgacggccagtcccacgttgaggtagagcaag

SEQ ID NO: 113224 - DNA, 21 bp, Artificial Sequence
  primer
agatctgacggaagccttgtc

SEQ ID NO: 113225 - DNA, 39 bp, Artificial Sequence
  primer
gtaaaacgacggccagtttatgaatgagggaaacttggg

SEQ ID NO: 113226 - DNA, 38 bp, Artificial Sequence
  primer
gtaaaacgacggccagtgggaattgcatgatgacacac

SEQ ID NO: 113227 - DNA, 40 bp, Artificial Sequence
  primer
gtaaaacgacggccagttgtctggtaacagaggtccaatc

SEQ ID NO: 113228 - DNA, 38 bp, Artificial Sequence
  primer
gtaaaacgacggccagtttaattggctgaaaccactgc

SEQ ID NO: 113229 - DNA, 42 bp, Artificial Sequence
  primer
gtaaaacgacggccagtgaaatgactttagacaaatggcttg

SEQ ID NO: 113230 - DNA, 21 bp, Artificial Sequence
  primer
tacaaagctggagtttgtgcg

SEQ ID NO: 113231 - DNA, 21 bp, Artificial Sequence
  primer
tccaacgtggttgttaagtgg

SEQ ID NO: 113232 - DNA, 38 bp, Artificial Sequence
  primer
gtaaaacgacggccagtgctcacacatcactttgcctg

SEQ ID NO: 113233 - DNA, 38 bp, Artificial Sequence
  primer
gtaaaacgacggccagtttgcactcgtggaaattcttg

SEQ ID NO: 113234 - DNA, 20 bp, Artificial Sequence
  primer
ggtgtaggagtacacccgcc

SEQ ID NO: 113235 - DNA, 20 bp, Artificial Sequence
  primer
ctgcaaatcagcctccactc

SEQ ID NO: 113236 - DNA, 38 bp, Artificial Sequence
  primer
gtaaaacgacggccagtccagggacagtaggcagaatc

SEQ ID NO: 113237 - DNA, 36 bp, Artificial Sequence
  primer
gtaaaacgacggccagtctgccatgtgccttcttcc

SEQ ID NO: 113238 - DNA, 22 bp, Artificial Sequence
  primer
tcacatatacaccaggaggtgc

SEQ ID NO: 113239 - DNA, 22 bp, Artificial Sequence
  primer
tgccttcgtgaatgagaatatg

SEQ ID NO: 113240 - DNA, 21 bp, Artificial Sequence
  primer
cgtgcattaggaaacatttgg

SEQ ID NO: 113241 - DNA, 21 bp, Artificial Sequence
  primer
agccatgggttaggaaacaac

SEQ ID NO: 113242 - DNA, 24 bp, Artificial Sequence
  primer
gccaaagttctaaatattcaacgc

SEQ ID NO: 113243 - DNA, 24 bp, Artificial Sequence
  primer
tgctttccttaaggcataactttg

SEQ ID NO: 113244 - DNA, 37 bp, Artificial Sequence
  primer
gtaaaacgacggccagtagcctcagctgaaaccaatg

SEQ ID NO: 113245 - DNA, 41 bp, Artificial Sequence
  primer
gtaaaacgacggccagtcagatagtcttcctggatgtcaaa

SEQ ID NO: 113246 - DNA, 26 bp, Artificial Sequence
  primer
ggtaaggaatactcaacctgtaccac

SEQ ID NO: 113247 - DNA, 25 bp, Artificial Sequence
  primer
ccaattctgtaactattcctttccc

SEQ ID NO: 113248 - DNA, 23 bp, Artificial Sequence
  primer
aaaggactgtagtagcaggtggg

SEQ ID NO: 113249 - DNA, 38 bp, Artificial Sequence
  primer
gtaaaacgacggccagtgaccatggcataccagtaagg

SEQ ID NO: 113250 - DNA, 24 bp, Artificial Sequence
  primer
tttactgtagggcatctcaaatcc

SEQ ID NO: 113251 - DNA, 37 bp, Artificial Sequence
  primer
gtaaaacgacggccagtccctgcccatattcacactg

SEQ ID NO: 113252 - DNA, 22 bp, Artificial Sequence
  primer
gaaggtctttgggtggctattc

SEQ ID NO: 113253 - DNA, 21 bp, Artificial Sequence
  primer
cccaagaacatatgcagaccc

SEQ ID NO: 113254 - DNA, 21 bp, Artificial Sequence
  primer
attcctaggcttctcccattg

SEQ ID NO: 113255 - DNA, 38 bp, Artificial Sequence
  primer
gtaaaacgacggccagtcaccttatgttgtgacctgcc

SEQ ID NO: 113256 - DNA, 21 bp, Artificial Sequence
  primer
ataaggccatgtccctccaag

SEQ ID NO: 113257 - DNA, 20 bp, Artificial Sequence
  primer
agaggctgtctccctggttc

SEQ ID NO: 113258 - DNA, 20 bp, Artificial Sequence
  primer
gcagtcacggaggaattgtg

SEQ ID NO: 113259 - DNA, 21 bp, Artificial Sequence
  primer
gggaaggagagaggtggagag

SEQ ID NO: 113260 - DNA, 38 bp, Artificial Sequence
  primer
gtaaaacgacggccagtaaagaagagtctgctggaggg

SEQ ID NO: 113261 - DNA, 24 bp, Artificial Sequence
  primer
ttagtacaggatttccaccaacac

SEQ ID NO: 113262 - DNA, 41 bp, Artificial Sequence
  primer
gtaaaacgacggccagttcttcctagttcaaactgaggtgc

SEQ ID NO: 113263 - DNA, 23 bp, Artificial Sequence
  primer
gggctttataacgattacagtca

SEQ ID NO: 113264 - DNA, 27 bp, Artificial Sequence
  primer
cacatgtaagttatgattacagggaaa

SEQ ID NO: 113265 - DNA, 23 bp, Artificial Sequence
  primer
gctttaggaacaaaccatctcaa

SEQ ID NO: 113266 - DNA, 25 bp, Artificial Sequence
  primer
tctgtaagctacttcttgcatttcc

SEQ ID NO: 113267 - DNA, 38 bp, Artificial Sequence
  primer
gtaaaacgacggccagttgaatgccaccaagaatgaaa

SEQ ID NO: 113268 - DNA, 38 bp, Artificial Sequence
  primer
gtaaaacgacggccagtttgggacactttgcccttatc

SEQ ID NO: 113269 - DNA, 38 bp, Artificial Sequence
  primer
gtaaaacgacggccagtgtgcacacactatcaaggcaa

SEQ ID NO: 113270 - DNA, 36 bp, Artificial Sequence
  primer
gtaaaacgacggccagtccgctcagctcatctcctg

SEQ ID NO: 113271 - DNA, 38 bp, Artificial Sequence
  primer
gtaaaacgacggccagtttcactgaaagcatttgtccc

SEQ ID NO: 113272 - DNA, 21 bp, Artificial Sequence
  primer
tgtggaaagaagccctacagc

SEQ ID NO: 113273 - DNA, 41 bp, Artificial Sequence
  primer
gtaaaacgacggccagttgacctagcacattaccttaaccc

SEQ ID NO: 113274 - DNA, 22 bp, Artificial Sequence
  primer
aatggtatcggattcaggtgtg

SEQ ID NO: 113275 - DNA, 38 bp, Artificial Sequence
  primer
gtaaaacgacggccagtaacccaaagcagggttaagtg

SEQ ID NO: 113276 - DNA, 39 bp, Artificial Sequence
  primer
gtaaaacgacggccagttgaacccacttggtagccttag

SEQ ID NO: 113277 - DNA, 21 bp, Artificial Sequence
  primer
tggaacactggaatcctgacc

SEQ ID NO: 113278 - DNA, 22 bp, Artificial Sequence
  primer
caagttaaccgaaggtgctctg

SEQ ID NO: 113279 - DNA, 21 bp, Artificial Sequence
  primer
aaccaaagtcagggcagagag

SEQ ID NO: 113280 - DNA, 37 bp, Artificial Sequence
  primer
gtaaaacgacggccagttcctgatctcgtgatccacc

SEQ ID NO: 113281 - DNA, 21 bp, Artificial Sequence
  primer
cagcactgagatcgtctgcac

SEQ ID NO: 113282 - DNA, 38 bp, Artificial Sequence
  primer
gtaaaacgacggccagtgcaggaagaactcgagcaatg

SEQ ID NO: 113283 - DNA, 21 bp, Artificial Sequence
  primer
agaagaagtagggcatcacgg

SEQ ID NO: 113284 - DNA, 38 bp, Artificial Sequence
  primer
gtaaaacgacggccagtcccatctcctggataggaagg

SEQ ID NO: 113285 - DNA, 38 bp, Artificial Sequence
  primer
gtaaaacgacggccagtggttatgaggagaccactgcc

SEQ ID NO: 113286 - DNA, 38 bp, Artificial Sequence
  primer
gtaaaacgacggccagtaggagtactctacccaccgcc

SEQ ID NO: 113287 - DNA, 21 bp, Artificial Sequence
  primer
aagaagggcaggaataccctc

SEQ ID NO: 113288 - DNA, 38 bp, Artificial Sequence
  primer
gtaaaacgacggccagtggaacatcaggccaatgaaac

SEQ ID NO: 113289 - DNA, 21 bp, Artificial Sequence
  primer
ctgcaagacaccctcatcaac

SEQ ID NO: 113290 - DNA, 21 bp, Artificial Sequence
  primer
attgtcttccagctctccagg

SEQ ID NO: 113291 - DNA, 37 bp, Artificial Sequence
  primer
gtaaaacgacggccagtcccaaagccctctagtcctg

SEQ ID NO: 113292 - DNA, 38 bp, Artificial Sequence
  primer
gtaaaacgacggccagtccaagaggtccaagaaaccag

SEQ ID NO: 113293 - DNA, 38 bp, Artificial Sequence
  primer
gtaaaacgacggccagtcctatgaagcacaccttcgtg

SEQ ID NO: 113294 - DNA, 21 bp, Artificial Sequence
  primer
tcctggcacaacatttcactc

SEQ ID NO: 113295 - DNA, 20 bp, Artificial Sequence
  primer
gagatgagagggccagatcc

SEQ ID NO: 113296 - DNA, 20 bp, Artificial Sequence
  primer
ttggcagcaatgtccttacc

SEQ ID NO: 113297 - DNA, 38 bp, Artificial Sequence
  primer
gtaaaacgacggccagttcaaattcctttgcctcgttc

SEQ ID NO: 113298 - DNA, 38 bp, Artificial Sequence
  primer
gtaaaacgacggccagtgccgaccaagttatcttctgc

SEQ ID NO: 113299 - DNA, 22 bp, Artificial Sequence
  primer
ttgatgaacctccttgatgaaa

SEQ ID NO: 113300 - DNA, 21 bp, Artificial Sequence
  primer
caacatcaacccttcatgtcc

SEQ ID NO: 113301 - DNA, 39 bp, Artificial Sequence
  primer
gtaaaacgacggccagtttcagggtatggatactggcac

SEQ ID NO: 113302 - DNA, 18 bp, Artificial Sequence
  primer
cttcgagggaaggaaccg

SEQ ID NO: 113303 - DNA, 20 bp, Artificial Sequence
  primer
caaggctcgcagtcactctc

SEQ ID NO: 113304 - DNA, 38 bp, Artificial Sequence
  primer
gtaaaacgacggccagtgtcctcattgccgcttaattc

SEQ ID NO: 113305 - DNA, 38 bp, Artificial Sequence
  primer
gtaaaacgacggccagtatcccaagaggaccctaccac

SEQ ID NO: 113306 - DNA, 38 bp, Artificial Sequence
  primer
gtaaaacgacggccagtcccagaatgttgtctgttccc

SEQ ID NO: 113307 - DNA, 21 bp, Artificial Sequence
  primer
ttctccagcaagggaaacaac

SEQ ID NO: 113308 - DNA, 38 bp, Artificial Sequence
  primer
gtaaaacgacggccagttcagaagcctgtcatttcctg

SEQ ID NO: 113309 - DNA, 39 bp, Artificial Sequence
  primer
gtaaaacgacggccagtgggcagaccttgtcttgtaatg

SEQ ID NO: 113310 - DNA, 38 bp, Artificial Sequence
  primer
gtaaaacgacggccagtcttagctcgaccactacaccg

SEQ ID NO: 113311 - DNA, 38 bp, Artificial Sequence
  primer
gtaaaacgacggccagtcttcccttatctggccttctg

SEQ ID NO: 113312 - DNA, 21 bp, Artificial Sequence
  primer
tcctacagctcagcagtccag

SEQ ID NO: 113313 - DNA, 38 bp, Artificial Sequence
  primer
gtaaaacgacggccagtaacagagaggatggagatggg

SEQ ID NO: 113314 - DNA, 21 bp, Artificial Sequence
  primer
ctcaagtgcctttgcattctg

SEQ ID NO: 113315 - DNA, 22 bp, Artificial Sequence
  primer
gacgttcacactaagggtaggc

SEQ ID NO: 113316 - DNA, 21 bp, Artificial Sequence
  primer
ctcaacaaatgcaactgtccc

SEQ ID NO: 113317 - DNA, 38 bp, Artificial Sequence
  primer
gtaaaacgacggccagttcctcacaccctttcactcac

SEQ ID NO: 113318 - DNA, 38 bp, Artificial Sequence
  primer
gtaaaacgacggccagttgtttcagccacctgaaattg

SEQ ID NO: 113319 - DNA, 41 bp, Artificial Sequence
  primer
gtaaaacgacggccagttttctcttctcccacttagcattt

SEQ ID NO: 113320 - DNA, 21 bp, Artificial Sequence
  primer
gaccctgggagagaggatgac

SEQ ID NO: 113321 - DNA, 20 bp, Artificial Sequence
  primer
tgagctccatcctgcacttc

SEQ ID NO: 113322 - DNA, 21 bp, Artificial Sequence
  primer
ttcttcacgataaggagcgtc

SEQ ID NO: 113323 - DNA, 21 bp, Artificial Sequence
  primer
gggctggaaaggtccagttac

SEQ ID NO: 113324 - DNA, 39 bp, Artificial Sequence
  primer
gtaaaacgacggccagtcagggatacactccctagaccc

SEQ ID NO: 113325 - DNA, 21 bp, Artificial Sequence
  primer
tctaagggtatgcaaggtggg

SEQ ID NO: 113326 - DNA, 38 bp, Artificial Sequence
  primer
gtaaaacgacggccagtgtggtcgagcatgagtttcac

SEQ ID NO: 113327 - DNA, 38 bp, Artificial Sequence
  primer
gtaaaacgacggccagtccatcatcacaactgaggagc

SEQ ID NO: 113328 - DNA, 38 bp, Artificial Sequence
  primer
gtaaaacgacggccagtctctgccatcacaagaccctc

SEQ ID NO: 113329 - DNA, 21 bp, Artificial Sequence
  primer
gtctccaagtctccctggctc

SEQ ID NO: 113330 - DNA, 37 bp, Artificial Sequence
  primer
gtaaaacgacggccagtgactatggtgggaggtgtgg

SEQ ID NO: 113331 - DNA, 21 bp, Artificial Sequence
  primer
ttcagggaaacaagtggaagg

SEQ ID NO: 113332 - DNA, 37 bp, Artificial Sequence
  primer
gtaaaacgacggccagtgggaagatgacaacgctgag

SEQ ID NO: 113333 - DNA, 21 bp, Artificial Sequence
  primer
agggaatcactctgagggttg

SEQ ID NO: 113334 - DNA, 38 bp, Artificial Sequence
  primer
gtaaaacgacggccagtgctggacaaggtgaaggaaag

SEQ ID NO: 113335 - DNA, 21 bp, Artificial Sequence
  primer
acagagaaggaaactgcggtc

SEQ ID NO: 113336 - DNA, 21 bp, Artificial Sequence
  primer
ggcagaaggaagtgacaaagg

SEQ ID NO: 113337 - DNA, 38 bp, Artificial Sequence
  primer
gtaaaacgacggccagtaagggcaatttccttctcaca

SEQ ID NO: 113338 - DNA, 38 bp, Artificial Sequence
  primer
gtaaaacgacggccagttgctgtgtatgtgcatcttgg

SEQ ID NO: 113339 - DNA, 38 bp, Artificial Sequence
  primer
gtaaaacgacggccagtagagggtaacattgcctttgg

SEQ ID NO: 113340 - DNA, 41 bp, Artificial Sequence
  primer
gtaaaacgacggccagttgtaggtcccagaattatacctcg

SEQ ID NO: 113341 - DNA, 21 bp, Artificial Sequence
  primer
aaagacagtcgtgaggatggc

SEQ ID NO: 113342 - DNA, 38 bp, Artificial Sequence
  primer
gtaaaacgacggccagttagactgggcccaaagttctc

SEQ ID NO: 113343 - DNA, 21 bp, Artificial Sequence
  primer
ccaggtacacgatatcagccc

SEQ ID NO: 113344 - DNA, 21 bp, Artificial Sequence
  primer
gtcctcatgtttgtggctctg

SEQ ID NO: 113345 - DNA, 20 bp, Artificial Sequence
  primer
cctcctgagactcccagtcc

SEQ ID NO: 113346 - DNA, 20 bp, Artificial Sequence
  primer
cgttcagcctgttcctgttc

SEQ ID NO: 113347 - DNA, 38 bp, Artificial Sequence
  primer
gtaaaacgacggccagtcacaccttgcagatggaaatc

SEQ ID NO: 113348 - DNA, 21 bp, Artificial Sequence
  primer
gaggatcccagtgaccaagag

SEQ ID NO: 113349 - DNA, 21 bp, Artificial Sequence
  primer
aaaggaagggacatggaaagg

SEQ ID NO: 113350 - DNA, 21 bp, Artificial Sequence
  primer
caccatcttggacagagcatc

SEQ ID NO: 113351 - DNA, 21 bp, Artificial Sequence
  primer
gagccaagtgatgcttctgag

SEQ ID NO: 113352 - DNA, 22 bp, Artificial Sequence
  primer
aacatgcaaaggagctaccaaa

SEQ ID NO: 113353 - DNA, 38 bp, Artificial Sequence
  primer
gtaaaacgacggccagtaagcctccatctaacaagccc

SEQ ID NO: 113354 - DNA, 40 bp, Artificial Sequence
  primer
gtaaaacgacggccagtcaccaaactagagaaagcactgg

SEQ ID NO: 113355 - DNA, 21 bp, Artificial Sequence
  primer
ataatcactgctctcccgtgc

SEQ ID NO: 113356 - DNA, 21 bp, Artificial Sequence
  primer
gcagtgtgtcgttcttgaagc

SEQ ID NO: 113357 - DNA, 38 bp, Artificial Sequence
  primer
gtaaaacgacggccagtatagctccagctgaccagtcc

SEQ ID NO: 113358 - DNA, 37 bp, Artificial Sequence
  primer
gtaaaacgacggccagtatcacacttcaggcccacac

SEQ ID NO: 113359 - DNA, 21 bp, Artificial Sequence
  primer
gccagattccagacctcactc

SEQ ID NO: 113360 - DNA, 25 bp, Artificial Sequence
  primer
tccaggtttacatcttcattattcc

SEQ ID NO: 113361 - DNA, 39 bp, Artificial Sequence
  primer
gtaaaacgacggccagtaaagacacactccaaacatcca

SEQ ID NO: 113362 - DNA, 21 bp, Artificial Sequence
  primer
cttcaatcttcatgcccagag

SEQ ID NO: 113363 - DNA, 20 bp, Artificial Sequence
  primer
gtggcaccactgctctcaag

SEQ ID NO: 113364 - DNA, 39 bp, Artificial Sequence
  primer
gtaaaacgacggccagttgaacgctgtaaagaagcacag

SEQ ID NO: 113365 - DNA, 23 bp, Artificial Sequence
  primer
caagaagaattaggaaggcacaa

SEQ ID NO: 113366 - DNA, 38 bp, Artificial Sequence
  primer
gtaaaacgacggccagttttctgaagcaggaggatcac

SEQ ID NO: 113367 - DNA, 38 bp, Artificial Sequence
  primer
gtaaaacgacggccagtaaggctgtgggaatctgtacg

SEQ ID NO: 113368 - DNA, 37 bp, Artificial Sequence
  primer
gtaaaacgacggccagtaggttactgggttcaagccg

SEQ ID NO: 113369 - DNA, 21 bp, Artificial Sequence
  primer
atcggatcaactctgacaccc

SEQ ID NO: 113370 - DNA, 21 bp, Artificial Sequence
  primer
aggcaatctccattaagtcgg

SEQ ID NO: 113371 - DNA, 40 bp, Artificial Sequence
  primer
gtaaaacgacggccagttgatggtagttgaaagcaagagg

SEQ ID NO: 113372 - DNA, 21 bp, Artificial Sequence
  primer
actccttggttactgcttggc

SEQ ID NO: 113373 - DNA, 21 bp, Artificial Sequence
  primer
gctgggcaacctcttattcac

SEQ ID NO: 113374 - DNA, 38 bp, Artificial Sequence
  primer
gtaaaacgacggccagtgcaggtgctgaccttgaatac

SEQ ID NO: 113375 - DNA, 41 bp, Artificial Sequence
  primer
gtaaaacgacggccagtcttgttgagctcagaataaacaga

SEQ ID NO: 113376 - DNA, 38 bp, Artificial Sequence
  primer
gtaaaacgacggccagtgacactgagatggtcgcaaac

SEQ ID NO: 113377 - DNA, 21 bp, Artificial Sequence
  primer
ccattctcccaactttctccc

SEQ ID NO: 113378 - DNA, 21 bp, Artificial Sequence
  primer
gaatgtgtccctgtcaagcag

SEQ ID NO: 113379 - DNA, 38 bp, Artificial Sequence
  primer
gtaaaacgacggccagtaacgacagtcattccctcctc

SEQ ID NO: 113380 - DNA, 21 bp, Artificial Sequence
  primer
gtccaaagaagtgtccttgcc

SEQ ID NO: 113381 - DNA, 21 bp, Artificial Sequence
  primer
agaagtgtcttcccatttggc

SEQ ID NO: 113382 - DNA, 38 bp, Artificial Sequence
  primer
gtaaaacgacggccagtccacagtgacagtaaggtggg

SEQ ID NO: 113383 - DNA, 38 bp, Artificial Sequence
  primer
gtaaaacgacggccagtagaaggcacgtaactgcactg

SEQ ID NO: 113384 - DNA, 37 bp, Artificial Sequence
  primer
gtaaaacgacggccagttggttcccaggaaacatcag

SEQ ID NO: 113385 - DNA, 21 bp, Artificial Sequence
  primer
ttcctctacctcctcctgctg

SEQ ID NO: 113386 - DNA, 21 bp, Artificial Sequence
  primer
caccctattcgcaaactggac

SEQ ID NO: 113387 - DNA, 38 bp, Artificial Sequence
  primer
gtaaaacgacggccagttttaattctccacaccacggg

SEQ ID NO: 113388 - DNA, 38 bp, Artificial Sequence
  primer
gtaaaacgacggccagtcctggagtctggaaaggacac

SEQ ID NO: 113389 - DNA, 22 bp, Artificial Sequence
  primer
ccctggctacttccttcttacg

SEQ ID NO: 113390 - DNA, 26 bp, Artificial Sequence
  primer
gctaggtacacaacaacacttattgc

SEQ ID NO: 113391 - DNA, 38 bp, Artificial Sequence
  primer
gtaaaacgacggccagtgagccatggacctatccattc

SEQ ID NO: 113392 - DNA, 38 bp, Artificial Sequence
  primer
gtaaaacgacggccagtatggtgtgagatgctggactc

SEQ ID NO: 113393 - DNA, 21 bp, Artificial Sequence
  primer
tgtaggcttctttcccaccac

SEQ ID NO: 113394 - DNA, 39 bp, Artificial Sequence
  primer
gtaaaacgacggccagtttaaggaatagggaagggcttg

SEQ ID NO: 113395 - DNA, 40 bp, Artificial Sequence
  primer
gtaaaacgacggccagtcctactaggcctgtctcaacatc

SEQ ID NO: 113396 - DNA, 38 bp, Artificial Sequence
  primer
gtaaaacgacggccagtaaatgggtcatttcaccttgg

SEQ ID NO: 113397 - DNA, 22 bp, Artificial Sequence
  primer
cagttcttgggatatagcaggg

SEQ ID NO: 113398 - DNA, 20 bp, Artificial Sequence
  primer
actcaggaggctgagatggg

SEQ ID NO: 113399 - DNA, 38 bp, Artificial Sequence
  primer
gtaaaacgacggccagttatctggcccatgacaaacag

SEQ ID NO: 113400 - DNA, 21 bp, Artificial Sequence
  primer
gctatatcctcagtgccagcc

SEQ ID NO: 113401 - DNA, 39 bp, Artificial Sequence
  primer
gtaaaacgacggccagttgttgtcccatttgtctgattg

SEQ ID NO: 113402 - DNA, 21 bp, Artificial Sequence
  primer
ttccctcttcccatccaatag

SEQ ID NO: 113403 - DNA, 37 bp, Artificial Sequence
  primer
gtaaaacgacggccagtccttcaagggattactgggc

SEQ ID NO: 113404 - DNA, 40 bp, Artificial Sequence
  primer
gtaaaacgacggccagtaaggatttgggcaataaattcac

SEQ ID NO: 113405 - DNA, 22 bp, Artificial Sequence
  primer
aaacttggcctatctcctgttt

SEQ ID NO: 113406 - DNA, 22 bp, Artificial Sequence
  primer
ttcaacctaggctggttaggag

SEQ ID NO: 113407 - DNA, 18 bp, Artificial Sequence
  primer
aggtgtgaaccaccgcac

SEQ ID NO: 113408 - DNA, 22 bp, Artificial Sequence
  primer
gcaacgtttgcaagtgatttac

SEQ ID NO: 113409 - DNA, 45 bp, Artificial Sequence
  primer
gtaaaacgacggccagttgtatctcctaggaagggctatactatt

SEQ ID NO: 113410 - DNA, 41 bp, Artificial Sequence
  primer
gtaaaacgacggccagtagagttcagaagcatgtgttaagg

SEQ ID NO: 113411 - DNA, 38 bp, Artificial Sequence
  primer
gtaaaacgacggccagttttggatgccttgaaagtgac

SEQ ID NO: 113412 - DNA, 21 bp, Artificial Sequence
  primer
tgctgggagggtcaagtaaag

SEQ ID NO: 113413 - DNA, 39 bp, Artificial Sequence
  primer
gtaaaacgacggccagtctgccatgatttgaaagatttg

SEQ ID NO: 113414 - DNA, 25 bp, Artificial Sequence
  primer
tgttggttatagtccttgctctgac

SEQ ID NO: 113415 - DNA, 21 bp, Artificial Sequence
  primer
gggaatgcttcacttggtttg

SEQ ID NO: 113416 - DNA, 40 bp, Artificial Sequence
  primer
gtaaaacgacggccagtcgtattctataagccggagagtg

SEQ ID NO: 113417 - DNA, 26 bp, Artificial Sequence
  primer
aagagagaaatgataagccagttcac

SEQ ID NO: 113418 - DNA, 38 bp, Artificial Sequence
  primer
gtaaaacgacggccagtactaatgttcctagggcggtg

SEQ ID NO: 113419 - DNA, 21 bp, Artificial Sequence
  primer
cttgtccgaaggaacacattc

SEQ ID NO: 113420 - DNA, 21 bp, Artificial Sequence
  primer
ccacccaagattcagtgagac

SEQ ID NO: 113421 - DNA, 22 bp, Artificial Sequence
  primer
ttactttgcatccttgattggg

SEQ ID NO: 113422 - DNA, 37 bp, Artificial Sequence
  primer
gtaaaacgacggccagtaggctaagtttggcagcaca

SEQ ID NO: 113423 - DNA, 21 bp, Artificial Sequence
  primer
aagtcacaccggtgagttgtg

SEQ ID NO: 113424 - DNA, 21 bp, Artificial Sequence
  primer
gtccttgacgacaactttccc

SEQ ID NO: 113425 - DNA, 38 bp, Artificial Sequence
  primer
gtaaaacgacggccagtaacctggaggagagggatagc

SEQ ID NO: 113426 - DNA, 22 bp, Artificial Sequence
  primer
tgcggaagaatttatgaccttg

SEQ ID NO: 113427 - DNA, 20 bp, Artificial Sequence
  primer
cctatgtgggcactttcctg

SEQ ID NO: 113428 - DNA, 37 bp, Artificial Sequence
  primer
gtaaaacgacggccagtgtgatgacaactccgtgagg

SEQ ID NO: 113429 - DNA, 38 bp, Artificial Sequence
  primer
gtaaaacgacggccagtacatggctggtgtgttgaaag

SEQ ID NO: 113430 - DNA, 21 bp, Artificial Sequence
  primer
gaagttcatagctccgttccg

SEQ ID NO: 113431 - DNA, 38 bp, Artificial Sequence
  primer
gtaaaacgacggccagtcacatctgctggaatgtggac

SEQ ID NO: 113432 - DNA, 38 bp, Artificial Sequence
  primer
gtaaaacgacggccagtcctcgattctactgaaagcgg

SEQ ID NO: 113433 - DNA, 38 bp, Artificial Sequence
  primer
gtaaaacgacggccagttggaaaggcttacatttgcag

SEQ ID NO: 113434 - DNA, 38 bp, Artificial Sequence
  primer
gtaaaacgacggccagtgcagcacatttcattctttgc

SEQ ID NO: 113435 - DNA, 38 bp, Artificial Sequence
  primer
gtaaaacgacggccagtgaggaatcgttcattcgaagc

SEQ ID NO: 113436 - DNA, 21 bp, Artificial Sequence
  primer
atggttggcagaaatggaaac

SEQ ID NO: 113437 - DNA, 21 bp, Artificial Sequence
  primer
gtgtccacggctctgatgtag

SEQ ID NO: 113438 - DNA, 21 bp, Artificial Sequence
  primer
aggcagaggtatggaacatcc

SEQ ID NO: 113439 - DNA, 21 bp, Artificial Sequence
  primer
catctccattgattgcacagc

SEQ ID NO: 113440 - DNA, 38 bp, Artificial Sequence
  primer
gtaaaacgacggccagttttcccacatatgccacactc

SEQ ID NO: 113441 - DNA, 20 bp, Artificial Sequence
  primer
attcgctgcactcatatggc

SEQ ID NO: 113442 - DNA, 41 bp, Artificial Sequence
  primer
gtaaaacgacggccagtaagtacatgtttgtggctaaaggc

SEQ ID NO: 113443 - DNA, 39 bp, Artificial Sequence
  primer
gtaaaacgacggccagtcggctacacataaaggctatgc

SEQ ID NO: 113444 - DNA, 21 bp, Artificial Sequence
  primer
ctgctgcttgtacagaatggg

SEQ ID NO: 113445 - DNA, 38 bp, Artificial Sequence
  primer
gtaaaacgacggccagtgaagggtgctagagcaaatgg

SEQ ID NO: 113446 - DNA, 38 bp, Artificial Sequence
  primer
gtaaaacgacggccagtttcagaaggctaagctgggag

SEQ ID NO: 113447 - DNA, 21 bp, Artificial Sequence
  primer
agtcacaggagtctgagcacc

SEQ ID NO: 113448 - DNA, 37 bp, Artificial Sequence
  primer
gtaaaacgacggccagttgacaggtttcacctctggc

SEQ ID NO: 113449 - DNA, 21 bp, Artificial Sequence
  primer
ggtgcctagcacacagtgaac

SEQ ID NO: 113450 - DNA, 24 bp, Artificial Sequence
  primer
ttgaatgtctattacttgcttggg

SEQ ID NO: 113451 - DNA, 21 bp, Artificial Sequence
  primer
caggatttcagcaagaaatgg

SEQ ID NO: 113452 - DNA, 22 bp, Artificial Sequence
  primer
tttgtgaagttggattgattgg

SEQ ID NO: 113453 - DNA, 28 bp, Artificial Sequence
  primer
aataaacttaaaggtttgggttaacatt

SEQ ID NO: 113454 - DNA, 20 bp, Artificial Sequence
  primer
tgctcacatggctttaaggg

SEQ ID NO: 113455 - DNA, 38 bp, Artificial Sequence
  primer
gtaaaacgacggccagtatgctgctatgtccctaaccc

SEQ ID NO: 113456 - DNA, 40 bp, Artificial Sequence
  primer
gtaaaacgacggccagtcgtttctttgcaagacaattgag

SEQ ID NO: 113457 - DNA, 21 bp, Artificial Sequence
  primer
tgcaatagcaaggtgatttcc

SEQ ID NO: 113458 - DNA, 25 bp, Artificial Sequence
  primer
cacaataatctgacagtggtttctg

SEQ ID NO: 113459 - DNA, 25 bp, Artificial Sequence
  primer
tcttaagaaacccaagcaaattaaa

SEQ ID NO: 113460 - DNA, 21 bp, Artificial Sequence
  primer
tttcccagagacttcaaaggg

SEQ ID NO: 113461 - DNA, 22 bp, Artificial Sequence
  primer
tttacaaggaggcctctgattc

SEQ ID NO: 113462 - DNA, 25 bp, Artificial Sequence
  primer
gatgacctcagatttgacatattcc

SEQ ID NO: 113463 - DNA, 25 bp, Artificial Sequence
  primer
tcattcatggagaacttgatctttc

SEQ ID NO: 113464 - DNA, 21 bp, Artificial Sequence
  primer
gccctttccactaccaagtca

SEQ ID NO: 113465 - DNA, 38 bp, Artificial Sequence
  primer
gtaaaacgacggccagtaattcggaaagcgtgttatgg

SEQ ID NO: 113466 - DNA, 38 bp, Artificial Sequence
  primer
gtaaaacgacggccagtatatggccttggtgaaccttg

SEQ ID NO: 113467 - DNA, 22 bp, Artificial Sequence
  primer
tgattgattaattgcatgaggg

SEQ ID NO: 113468 - DNA, 21 bp, Artificial Sequence
  primer
gattgtgttcacctccacgtc

SEQ ID NO: 113469 - DNA, 20 bp, Artificial Sequence
  primer
cactacacctggcctcttcc

SEQ ID NO: 113470 - DNA, 35 bp, Artificial Sequence
  primer
gtaaaacgacggccagtgatgctagggagccgacc

SEQ ID NO: 113471 - DNA, 38 bp, Artificial Sequence
  primer
gtaaaacgacggccagtaacaccatgggaactgtaggg

SEQ ID NO: 113472 - DNA, 38 bp, Artificial Sequence
  primer
gtaaaacgacggccagtggagctcaaagaggtgtgtgg

SEQ ID NO: 113473 - DNA, 37 bp, Artificial Sequence
  primer
gtaaaacgacggccagtctaagacccaggctgtgtgg

SEQ ID NO: 113474 - DNA, 38 bp, Artificial Sequence
  primer
gtaaaacgacggccagttgacaaagtcctttccagcag

SEQ ID NO: 113475 - DNA, 21 bp, Artificial Sequence
  primer
ccaggtccatcaggcatttac

SEQ ID NO: 113476 - DNA, 38 bp, Artificial Sequence
  primer
gtaaaacgacggccagtctgcagggctacctgtttctc

SEQ ID NO: 113477 - DNA, 38 bp, Artificial Sequence
  primer
gtaaaacgacggccagtcctcgtgagttggtcctaagc

SEQ ID NO: 113478 - DNA, 21 bp, Artificial Sequence
  primer
tcctctccaatatccactggg

SEQ ID NO: 113479 - DNA, 38 bp, Artificial Sequence
  primer
gtaaaacgacggccagtagagaggacttcaatggcagc

SEQ ID NO: 113480 - DNA, 38 bp, Artificial Sequence
  primer
gtaaaacgacggccagtcctcaccagtgttctgacacc

SEQ ID NO: 113481 - DNA, 38 bp, Artificial Sequence
  primer
gtaaaacgacggccagtgagagagcagtccaggaaagg

SEQ ID NO: 113482 - DNA, 38 bp, Artificial Sequence
  primer
gtaaaacgacggccagttcatcgagttggattgcaaag

SEQ ID NO: 113483 - DNA, 21 bp, Artificial Sequence
  primer
cgagaagtcggctattcagtg

SEQ ID NO: 113484 - DNA, 20 bp, Artificial Sequence
  primer
gggtgtggttcactccaatc

SEQ ID NO: 113485 - DNA, 41 bp, Artificial Sequence
  primer
gtaaaacgacggccagttggaaacatatagtagctagggcg

SEQ ID NO: 113486 - DNA, 22 bp, Artificial Sequence
  primer
aaagcaaatggatctttcatcc

SEQ ID NO: 113487 - DNA, 42 bp, Artificial Sequence
  primer
gtaaaacgacggccagttcctacttagcagtggaaagtcatc

SEQ ID NO: 113488 - DNA, 38 bp, Artificial Sequence
  primer
gtaaaacgacggccagtcacccaagtaactgggactgc

SEQ ID NO: 113489 - DNA, 20 bp, Artificial Sequence
  primer
aggtggagaagcctgttgtg

SEQ ID NO: 113490 - DNA, 20 bp, Artificial Sequence
  primer
acagtggcagggtccatagc

SEQ ID NO: 113491 - DNA, 21 bp, Artificial Sequence
  primer
aaacagccttccttgagtccc

SEQ ID NO: 113492 - DNA, 38 bp, Artificial Sequence
  primer
gtaaaacgacggccagttagctagctctgcctcaaccc

SEQ ID NO: 113493 - DNA, 22 bp, Artificial Sequence
  primer
ccgcttcctgttaatgtaggtg

SEQ ID NO: 113494 - DNA, 38 bp, Artificial Sequence
  primer
gtaaaacgacggccagtatcccatggaatgtgttgatg

SEQ ID NO: 113495 - DNA, 21 bp, Artificial Sequence
  primer
gaccaaagaacaagccctgag

SEQ ID NO: 113496 - DNA, 21 bp, Artificial Sequence
  primer
gttacagatggtgctggatgc

SEQ ID NO: 113497 - DNA, 21 bp, Artificial Sequence
  primer
gacggacagtcaaaggtaggg

SEQ ID NO: 113498 - DNA, 21 bp, Artificial Sequence
  primer
tcaggacttgccacttcttcc

SEQ ID NO: 113499 - DNA, 21 bp, Artificial Sequence
  primer
gaagccaaagaaggtgaggtg

SEQ ID NO: 113500 - DNA, 21 bp, Artificial Sequence
  primer
cggcttcctaactcctcacac

SEQ ID NO: 113501 - DNA, 21 bp, Artificial Sequence
  primer
gattccaccacccttgatttc

SEQ ID NO: 113502 - DNA, 24 bp, Artificial Sequence
  primer
aagcttcaaacttcacaggtgttt

SEQ ID NO: 113503 - DNA, 40 bp, Artificial Sequence
  primer
gtaaaacgacggccagtgagatttaatggaggcctaaccc

SEQ ID NO: 113504 - DNA, 39 bp, Artificial Sequence
  primer
gtaaaacgacggccagtccagatccatcccgactatacc

SEQ ID NO: 113505 - DNA, 21 bp, Artificial Sequence
  primer
ggtagttgaagggtggcaaag

SEQ ID NO: 113506 - DNA, 28 bp, Artificial Sequence
  primer
ggtagtaagactttgaaagagaggattt

SEQ ID NO: 113507 - DNA, 38 bp, Artificial Sequence
  primer
gtaaaacgacggccagtaccacccacacaagtaaccac

SEQ ID NO: 113508 - DNA, 42 bp, Artificial Sequence
  primer
gtaaaacgacggccagtgctctttaattcgaagagactgtcc

SEQ ID NO: 113509 - DNA, 40 bp, Artificial Sequence
  primer
gtaaaacgacggccagtaacaagaccaaagccatttgtta

SEQ ID NO: 113510 - DNA, 21 bp, Artificial Sequence
  primer
cttgaaccaaagtggtggagg

SEQ ID NO: 113511 - DNA, 37 bp, Artificial Sequence
  primer
gtaaaacgacggccagtcctttgttccacttccaggg

SEQ ID NO: 113512 - DNA, 21 bp, Artificial Sequence
  primer
accgagcaagactgtctcaaa

SEQ ID NO: 113513 - DNA, 38 bp, Artificial Sequence
  primer
gtaaaacgacggccagtgtctcaggtaaacaggtgggc

SEQ ID NO: 113514 - DNA, 38 bp, Artificial Sequence
  primer
gtaaaacgacggccagttgccatctctctgatggtctg

SEQ ID NO: 113515 - DNA, 39 bp, Artificial Sequence
  primer
gtaaaacgacggccagttgctatttgaggatctggtttg

SEQ ID NO: 113516 - DNA, 21 bp, Artificial Sequence
  primer
gagtgggactgggttgttgag

SEQ ID NO: 113517 - DNA, 21 bp, Artificial Sequence
  primer
ccactccgaatttctctttgc

SEQ ID NO: 113518 - DNA, 21 bp, Artificial Sequence
  primer
atgcatgcacacacacaaagg

SEQ ID NO: 113519 - DNA, 38 bp, Artificial Sequence
  primer
gtaaaacgacggccagtggcacagtccactcttgtttg

SEQ ID NO: 113520 - DNA, 39 bp, Artificial Sequence
  primer
gtaaaacgacggccagtaatagggctgcaaataactccc

SEQ ID NO: 113521 - DNA, 38 bp, Artificial Sequence
  primer
gtaaaacgacggccagtagactctatctgggagggcag

SEQ ID NO: 113522 - DNA, 38 bp, Artificial Sequence
  primer
gtaaaacgacggccagtactctgatgcacgtggaagtc

SEQ ID NO: 113523 - DNA, 20 bp, Artificial Sequence
  primer
ccagctgatagccaagatgc

SEQ ID NO: 113524 - DNA, 20 bp, Artificial Sequence
  primer
ctcttccaggtagtgccgtg

SEQ ID NO: 113525 - DNA, 21 bp, Artificial Sequence
  primer
agttgagggtagcactctggg

SEQ ID NO: 113526 - DNA, 21 bp, Artificial Sequence
  primer
agcaggatgtagtagaggcgg

SEQ ID NO: 113527 - DNA, 38 bp, Artificial Sequence
  primer
gtaaaacgacggccagttgcatacagctgtccttccac

SEQ ID NO: 113528 - DNA, 21 bp, Artificial Sequence
  primer
agtggacaccacacacgactc

SEQ ID NO: 113529 - DNA, 38 bp, Artificial Sequence
  primer
gtaaaacgacggccagtagctacaggagtgtgccttgg

SEQ ID NO: 113530 - DNA, 37 bp, Artificial Sequence
  primer
gtaaaacgacggccagttttggcgacagagctacagg

SEQ ID NO: 113531 - DNA, 21 bp, Artificial Sequence
  primer
agccactggtgtccaagagtc

SEQ ID NO: 113532 - DNA, 21 bp, Artificial Sequence
  primer
acctctcagcctcttcgtctc

SEQ ID NO: 113533 - DNA, 19 bp, Artificial Sequence
  primer
ctgatcagcgccacagttc

SEQ ID NO: 113534 - DNA, 38 bp, Artificial Sequence
  primer
gtaaaacgacggccagtatattccatgcttgtccctgg

SEQ ID NO: 113535 - DNA, 38 bp, Artificial Sequence
  primer
gtaaaacgacggccagtaagcctgctctttaccacagc

SEQ ID NO: 113536 - DNA, 38 bp, Artificial Sequence
  primer
gtaaaacgacggccagtatggacctacacatcctgctg

SEQ ID NO: 113537 - DNA, 21 bp, Artificial Sequence
  primer
cccactgggaaccatgataac

SEQ ID NO: 113538 - DNA, 21 bp, Artificial Sequence
  primer
ctctggagtcctgtgattccc

SEQ ID NO: 113539 - DNA, 20 bp, Artificial Sequence
  primer
gaattgcagctccaggtcag

SEQ ID NO: 113540 - DNA, 20 bp, Artificial Sequence
  primer
ggcatgatctgatggtgctg

SEQ ID NO: 113541 - DNA, 37 bp, Artificial Sequence
  primer
gtaaaacgacggccagtaaggaggattgttgggcttg

SEQ ID NO: 113542 - DNA, 22 bp, Artificial Sequence
  primer
tcacgtctgtccagagaatgac

SEQ ID NO: 113543 - DNA, 38 bp, Artificial Sequence
  primer
gtaaaacgacggccagtcagtccatgcagtgactcctc

SEQ ID NO: 113544 - DNA, 38 bp, Artificial Sequence
  primer
gtaaaacgacggccagtaggtaggacacacacgctgtc

SEQ ID NO: 113545 - DNA, 21 bp, Artificial Sequence
  primer
cacattcttgcaggtgaggag

SEQ ID NO: 113546 - DNA, 21 bp, Artificial Sequence
  primer
gtgtcccaggattgtgagtgg

SEQ ID NO: 113547 - DNA, 37 bp, Artificial Sequence
  primer
gtaaaacgacggccagtaacgcacctggaacagacac

SEQ ID NO: 113548 - DNA, 19 bp, Artificial Sequence
  primer
agggctgcttccaattcag

SEQ ID NO: 113549 - DNA, 35 bp, Artificial Sequence
  primer
gtaaaacgacggccagtcagccgaggagggagatg

SEQ ID NO: 113550 - DNA, 39 bp, Artificial Sequence
  primer
gtaaaacgacggccagttgattcctagcgaagcttgatg

SEQ ID NO: 113551 - DNA, 38 bp, Artificial Sequence
  primer
gtaaaacgacggccagtaagagattcggagtaccctgc

SEQ ID NO: 113552 - DNA, 37 bp, Artificial Sequence
  primer
gtaaaacgacggccagtcagaagacagggcgtgagtc

SEQ ID NO: 113553 - DNA, 37 bp, Artificial Sequence
  primer
gtaaaacgacggccagtccagcctcaagacaaagtgg

SEQ ID NO: 113554 - DNA, 38 bp, Artificial Sequence
  primer
gtaaaacgacggccagtgtaggagcgtattggtggtgg

SEQ ID NO: 113555 - DNA, 21 bp, Artificial Sequence
  primer
ggtctacagatgcctcttggg

SEQ ID NO: 113556 - DNA, 21 bp, Artificial Sequence
  primer
gctggactgtacagatgggtg

SEQ ID NO: 113557 - DNA, 37 bp, Artificial Sequence
  primer
gtaaaacgacggccagtggaccatcagcaggaaggag

SEQ ID NO: 113558 - DNA, 21 bp, Artificial Sequence
  primer
cagaggccaaccctaaggaag

SEQ ID NO: 113559 - DNA, 21 bp, Artificial Sequence
  primer
tcgtcctttcaacaaagaccc

SEQ ID NO: 113560 - DNA, 21 bp, Artificial Sequence
  primer
taggaggcgtagagttcctgg

SEQ ID NO: 113561 - DNA, 20 bp, Artificial Sequence
  primer
aagtacctggccagaggagg

SEQ ID NO: 113562 - DNA, 21 bp, Artificial Sequence
  primer
tgagatgtggctatccgtttc

SEQ ID NO: 113563 - DNA, 37 bp, Artificial Sequence
  primer
gtaaaacgacggccagtacctgcaagagacagcatgg

SEQ ID NO: 113564 - DNA, 20 bp, Artificial Sequence
  primer
agagctgtctgcagggtcag

SEQ ID NO: 113565 - DNA, 21 bp, Artificial Sequence
  primer
acacatagggatggtccatga

SEQ ID NO: 113566 - DNA, 21 bp, Artificial Sequence
  primer
ggttgacacatctgatctggg

SEQ ID NO: 113567 - DNA, 22 bp, Artificial Sequence
  primer
ggtattctgtgctctgtgacca

SEQ ID NO: 113568 - DNA, 38 bp, Artificial Sequence
  primer
gtaaaacgacggccagtaggaggctgggagagactgag

SEQ ID NO: 113569 - DNA, 21 bp, Artificial Sequence
  primer
aagaatcttcactgggtgtgg

SEQ ID NO: 113570 - DNA, 24 bp, Artificial Sequence
  primer
tgatctaggttcactctctctggg

SEQ ID NO: 113571 - DNA, 21 bp, Artificial Sequence
  primer
ctccaggaaaccttcatgctc

SEQ ID NO: 113572 - DNA, 21 bp, Artificial Sequence
  primer
atcctgctggcagaatgtagg

SEQ ID NO: 113573 - DNA, 19 bp, Artificial Sequence
  primer
agagacagggcagagcgag

SEQ ID NO: 113574 - DNA, 21 bp, Artificial Sequence
  primer
aacggaaacaggtaacaacgg

SEQ ID NO: 113575 - DNA, 38 bp, Artificial Sequence
  primer
gtaaaacgacggccagttggcacgttaagatccatagc

SEQ ID NO: 113576 - DNA, 21 bp, Artificial Sequence
  primer
caacagtctgaaccagggaag

SEQ ID NO: 113577 - DNA, 38 bp, Artificial Sequence
  primer
gtaaaacgacggccagtgcaatttcacagattcttgcg

SEQ ID NO: 113578 - DNA, 21 bp, Artificial Sequence
  primer
ttaaagccacagccatagtcg

SEQ ID NO: 113579 - DNA, 18 bp, Artificial Sequence
  primer
tcactcgaacccgggaag

SEQ ID NO: 113580 - DNA, 39 bp, Artificial Sequence
  primer
gtaaaacgacggccagtgctgcgataagccacagtctac

SEQ ID NO: 113581 - DNA, 21 bp, Artificial Sequence
  primer
ttcggtagaggtagggaaggg

SEQ ID NO: 113582 - DNA, 18 bp, Artificial Sequence
  primer
gaggttgcagccctctcc

SEQ ID NO: 113583 - DNA, 22 bp, Artificial Sequence
  primer
tctgcatgtctgacagcttctc

SEQ ID NO: 113584 - DNA, 38 bp, Artificial Sequence
  primer
gtaaaacgacggccagtttccagcaatttgaccttgtg

SEQ ID NO: 113585 - DNA, 21 bp, Artificial Sequence
  primer
acactgagtgaccctgtcctg

SEQ ID NO: 113586 - DNA, 39 bp, Artificial Sequence
  primer
gtaaaacgacggccagtcatcagttccacctctacaccc

SEQ ID NO: 113587 - DNA, 21 bp, Artificial Sequence
  primer
attggccagtcctgtagtccc

SEQ ID NO: 113588 - DNA, 38 bp, Artificial Sequence
  primer
gtaaaacgacggccagtcctcagaatgtttgccaagtc

SEQ ID NO: 113589 - DNA, 38 bp, Artificial Sequence
  primer
gtaaaacgacggccagtaaggtgcccacagaccataag

SEQ ID NO: 113590 - DNA, 21 bp, Artificial Sequence
  primer
caggatatccatcagcttccc

SEQ ID NO: 113591 - DNA, 37 bp, Artificial Sequence
  primer
gtaaaacgacggccagtagggcagaagctctggaatc

SEQ ID NO: 113592 - DNA, 21 bp, Artificial Sequence
  primer
atgcagtatggcaaaggaagg

SEQ ID NO: 113593 - DNA, 38 bp, Artificial Sequence
  primer
gtaaaacgacggccagtaaagagggaagcttcagagcc

SEQ ID NO: 113594 - DNA, 20 bp, Artificial Sequence
  primer
cccaggttctggctgagtag

SEQ ID NO: 113595 - DNA, 39 bp, Artificial Sequence
  primer
gtaaaacgacggccagtgcttgcagaggaataaatttgc

SEQ ID NO: 113596 - DNA, 38 bp, Artificial Sequence
  primer
gtaaaacgacggccagtaaggcagctatgtccatttgc

SEQ ID NO: 113597 - DNA, 38 bp, Artificial Sequence
  primer
gtaaaacgacggccagttcctgatcgcagtcttgagtc

SEQ ID NO: 113598 - DNA, 21 bp, Artificial Sequence
  primer
catttcctcattctgccagtc

SEQ ID NO: 113599 - DNA, 22 bp, Artificial Sequence
  primer
gaaatcacaaacaccatccacc

SEQ ID NO: 113600 - DNA, 42 bp, Artificial Sequence
  primer
gtaaaacgacggccagtttcagaaataagagcaccaagtgtt

SEQ ID NO: 113601 - DNA, 38 bp, Artificial Sequence
  primer
gtaaaacgacggccagtacataggctcaaaggaggctg

SEQ ID NO: 113602 - DNA, 38 bp, Artificial Sequence
  primer
gtaaaacgacggccagttccattaaacacgaacatggg

SEQ ID NO: 113603 - DNA, 38 bp, Artificial Sequence
  primer
gtaaaacgacggccagtacctcaaacccatctatcccg

SEQ ID NO: 113604 - DNA, 21 bp, Artificial Sequence
  primer
atgcacagcccgtctaatagg

SEQ ID NO: 113605 - DNA, 23 bp, Artificial Sequence
  primer
tgtggaataaggtgtatgatggg

SEQ ID NO: 113606 - DNA, 25 bp, Artificial Sequence
  primer
ggctagaagacagcaaatctacctc

SEQ ID NO: 113607 - DNA, 21 bp, Artificial Sequence
  primer
ctgctgggaagttctgtctgc

SEQ ID NO: 113608 - DNA, 35 bp, Artificial Sequence
  primer
gtaaaacgacggccagtttcccttcccgtcctacg

SEQ ID NO: 113609 - DNA, 21 bp, Artificial Sequence
  primer
agagagcagggacagcatttc

SEQ ID NO: 113610 - DNA, 38 bp, Artificial Sequence
  primer
gtaaaacgacggccagtaagctcagaggttgggcatac

SEQ ID NO: 113611 - DNA, 21 bp, Artificial Sequence
  primer
gctcagaaggaatcaacaggg

SEQ ID NO: 113612 - DNA, 21 bp, Artificial Sequence
  primer
cacgaggaaatccgagacttg

SEQ ID NO: 113613 - DNA, 25 bp, Artificial Sequence
  primer
ttggaaatcattacttcaaatgctc

SEQ ID NO: 113614 - DNA, 38 bp, Artificial Sequence
  primer
gtaaaacgacggccagtaacacaccaggaaatgatggc

SEQ ID NO: 113615 - DNA, 21 bp, Artificial Sequence
  primer
atgatgcttgatggctttgtg

SEQ ID NO: 113616 - DNA, 21 bp, Artificial Sequence
  primer
acttcgagggtgtcactttgc

SEQ ID NO: 113617 - DNA, 38 bp, Artificial Sequence
  primer
gtaaaacgacggccagttggaaggtaaactcagcctgc

SEQ ID NO: 113618 - DNA, 20 bp, Artificial Sequence
  primer
tcgtaacgattccttccgtg

SEQ ID NO: 113619 - DNA, 21 bp, Artificial Sequence
  primer
tctggaaaccctggaagtgag

SEQ ID NO: 113620 - DNA, 20 bp, Artificial Sequence
  primer
tttgcagggaactgatggtc

SEQ ID NO: 113621 - DNA, 38 bp, Artificial Sequence
  primer
gtaaaacgacggccagttgagattcactaaacgtggcg

SEQ ID NO: 113622 - DNA, 39 bp, Artificial Sequence
  primer
gtaaaacgacggccagttcaaccaagtcctcacagtctc

SEQ ID NO: 113623 - DNA, 20 bp, Artificial Sequence
  primer
ctgcagactccgtcctaccc

SEQ ID NO: 113624 - DNA, 22 bp, Artificial Sequence
  primer
tgagaaacaggagcatcaagtg

SEQ ID NO: 113625 - DNA, 20 bp, Artificial Sequence
  primer
tgcccaaacaggatgacaag

SEQ ID NO: 113626 - DNA, 21 bp, Artificial Sequence
  primer
gatccagatttctgggacctg

SEQ ID NO: 113627 - DNA, 20 bp, Artificial Sequence
  primer
acatttcaccgtcagcgttc

SEQ ID NO: 113628 - DNA, 19 bp, Artificial Sequence
  primer
gagtgcacactgctggagg

SEQ ID NO: 113629 - DNA, 35 bp, Artificial Sequence
  primer
gtaaaacgacggccagtgaagcgcttggtgcaatg

SEQ ID NO: 113630 - DNA, 37 bp, Artificial Sequence
  primer
gtaaaacgacggccagtacaccggaaaggcttctctc

SEQ ID NO: 113631 - DNA, 20 bp, Artificial Sequence
  primer
ctctcagcatgctctccagg

SEQ ID NO: 113632 - DNA, 20 bp, Artificial Sequence
  primer
aagctcctgttgcactctgg

SEQ ID NO: 113633 - DNA, 21 bp, Artificial Sequence
  primer
ttcttgtcacactcagggcag

SEQ ID NO: 113634 - DNA, 21 bp, Artificial Sequence
  primer
aataccaatcctgctcaacgc

SEQ ID NO: 113635 - DNA, 37 bp, Artificial Sequence
  primer
gtaaaacgacggccagtgggtctggctactgttgctg

SEQ ID NO: 113636 - DNA, 21 bp, Artificial Sequence
  primer
aaggcacagtcagcatccttc

SEQ ID NO: 113637 - DNA, 21 bp, Artificial Sequence
  primer
ccatatttgtatccagcccac

SEQ ID NO: 113638 - DNA, 38 bp, Artificial Sequence
  primer
gtaaaacgacggccagtgaacaaagcctggcactgaag

SEQ ID NO: 113639 - DNA, 20 bp, Artificial Sequence
  primer
ctgggcacgatttctcattg

SEQ ID NO: 113640 - DNA, 20 bp, Artificial Sequence
  primer
ggcatggattcactccacag

SEQ ID NO: 113641 - DNA, 38 bp, Artificial Sequence
  primer
gtaaaacgacggccagtcaggaatccctgaaggttgtc

SEQ ID NO: 113642 - DNA, 40 bp, Artificial Sequence
  primer
gtaaaacgacggccagtaagactcccaaagtcttgaaacg

SEQ ID NO: 113643 - DNA, 20 bp, Artificial Sequence
  primer
aatgtctggcccaatcactg

SEQ ID NO: 113644 - DNA, 37 bp, Artificial Sequence
  primer
gtaaaacgacggccagtctccggatgctgggagatac

SEQ ID NO: 113645 - DNA, 38 bp, Artificial Sequence
  primer
gtaaaacgacggccagttggagcaagtttagagcaccc

SEQ ID NO: 113646 - DNA, 20 bp, Artificial Sequence
  primer
ctctgtggagaggctcctgg

SEQ ID NO: 113647 - DNA, 38 bp, Artificial Sequence
  primer
gtaaaacgacggccagtaaccaccatccaaggtctcag

SEQ ID NO: 113648 - DNA, 21 bp, Artificial Sequence
  primer
aaagctctctggaggcaagtg

SEQ ID NO: 113649 - DNA, 20 bp, Artificial Sequence
  primer
aagtcagaccaggcacaacg

SEQ ID NO: 113650 - DNA, 21 bp, Artificial Sequence
  primer
cagtgtctctttgcaagtggg

SEQ ID NO: 113651 - DNA, 21 bp, Artificial Sequence
  primer
agagcagcagagacagggaag

SEQ ID NO: 113652 - DNA, 21 bp, Artificial Sequence
  primer
ggacatcctccactatgccag

SEQ ID NO: 113653 - DNA, 38 bp, Artificial Sequence
  primer
gtaaaacgacggccagtagtttaaaggccaagcctgtg

SEQ ID NO: 113654 - DNA, 37 bp, Artificial Sequence
  primer
gtaaaacgacggccagtctcaaagttgcccagaggtg

SEQ ID NO: 113655 - DNA, 23 bp, Artificial Sequence
  primer
ggataagtagatcccactggagg

SEQ ID NO: 113656 - DNA, 21 bp, Artificial Sequence
  primer
ctgtgtcttgccttgtggaag

SEQ ID NO: 113657 - DNA, 21 bp, Artificial Sequence
  primer
aggccgagtgacctagaactg

SEQ ID NO: 113658 - DNA, 38 bp, Artificial Sequence
  primer
gtaaaacgacggccagtaaattccaggcaagaggaatc

SEQ ID NO: 113659 - DNA, 38 bp, Artificial Sequence
  primer
gtaaaacgacggccagtattaaaggccttcccacactg

SEQ ID NO: 113660 - DNA, 21 bp, Artificial Sequence
  primer
aggccttcccacattcattac

SEQ ID NO: 113661 - DNA, 37 bp, Artificial Sequence
  primer
gtaaaacgacggccagtaaacgatcagcacccttgag

SEQ ID NO: 113662 - DNA, 22 bp, Artificial Sequence
  primer
gcacacattcagcacgttctac

SEQ ID NO: 113663 - DNA, 20 bp, Artificial Sequence
  primer
gcatgctgaacacccatttg

SEQ ID NO: 113664 - DNA, 38 bp, Artificial Sequence
  primer
gtaaaacgacggccagtcacagtctgatgaccggagac

SEQ ID NO: 113665 - DNA, 24 bp, Artificial Sequence
  primer
tccttaggattgagttgatgaagg

SEQ ID NO: 113666 - DNA, 19 bp, Artificial Sequence
  primer
gcaagatgcaatggcaaac

SEQ ID NO: 113667 - DNA, 22 bp, Artificial Sequence
  primer
ggagacgatagcctgacttgag

SEQ ID NO: 113668 - DNA, 22 bp, Artificial Sequence
  primer
tctgtttccattatttgccacc

SEQ ID NO: 113669 - DNA, 38 bp, Artificial Sequence
  primer
gtaaaacgacggccagtccattcttctgcatctgaacc

SEQ ID NO: 113670 - DNA, 36 bp, Artificial Sequence
  primer
gtaaaacgacggccagtccatgccttcccagacttc

SEQ ID NO: 113671 - DNA, 40 bp, Artificial Sequence
  primer
gtaaaacgacggccagttgattctcaattgtagtttgggc

SEQ ID NO: 113672 - DNA, 21 bp, Artificial Sequence
  primer
gtcaggagactccactccctc

SEQ ID NO: 113673 - DNA, 21 bp, Artificial Sequence
  primer
atcatggtgaggctcttctgg

SEQ ID NO: 113674 - DNA, 21 bp, Artificial Sequence
  primer
agcctatccaagaggtgggac

SEQ ID NO: 113675 - DNA, 38 bp, Artificial Sequence
  primer
gtaaaacgacggccagtaacgacctctcaaaccaatcc

SEQ ID NO: 113676 - DNA, 37 bp, Artificial Sequence
  primer
gtaaaacgacggccagtacgcctaaagcacacacctg

SEQ ID NO: 113677 - DNA, 21 bp, Artificial Sequence
  primer
tcacactaaggccactgatcc

SEQ ID NO: 113678 - DNA, 22 bp, Artificial Sequence
  primer
ccattagagagtgcctaccctg

SEQ ID NO: 113679 - DNA, 39 bp, Artificial Sequence
  primer
gtaaaacgacggccagtcaccctatccttaagaggctgg

SEQ ID NO: 113680 - DNA, 21 bp, Artificial Sequence
  primer
cacaaggtcgccatctcttag

SEQ ID NO: 113681 - DNA, 21 bp, Artificial Sequence
  primer
acagggtttcgacatattgcc

SEQ ID NO: 113682 - DNA, 21 bp, Artificial Sequence
  primer
tgaaccatctcccactctgtg

SEQ ID NO: 113683 - DNA, 38 bp, Artificial Sequence
  primer
gtaaaacgacggccagtaacagatactgcagcacgagg

SEQ ID NO: 113684 - DNA, 21 bp, Artificial Sequence
  primer
aggagaattgcctgaacttcg

SEQ ID NO: 113685 - DNA, 26 bp, Artificial Sequence
  primer
gaaagaactttatttccatatggtgc

SEQ ID NO: 113686 - DNA, 21 bp, Artificial Sequence
  primer
agcagatactgggaatgggtg

SEQ ID NO: 113687 - DNA, 21 bp, Artificial Sequence
  primer
tattgtcctatgaccctgcca

SEQ ID NO: 113688 - DNA, 44 bp, Artificial Sequence
  primer
gtaaaacgacggccagttctttaactcctaattctcaattctgg

SEQ ID NO: 113689 - DNA, 23 bp, Artificial Sequence
  primer
cccaaatgacaagacctaaccac

SEQ ID NO: 113690 - DNA, 38 bp, Artificial Sequence
  primer
gtaaaacgacggccagtctgggcaacagattaagaccc

SEQ ID NO: 113691 - DNA, 37 bp, Artificial Sequence
  primer
gtaaaacgacggccagttcttggaggtggaaggaacc

SEQ ID NO: 113692 - DNA, 43 bp, Artificial Sequence
  primer
gtaaaacgacggccagtcctactatcccaattataagtacggc

SEQ ID NO: 113693 - DNA, 20 bp, Artificial Sequence
  primer
ctcatgggtaccgagggatg

SEQ ID NO: 113694 - DNA, 21 bp, Artificial Sequence
  primer
gtctggaccttgtgatctgcc

SEQ ID NO: 113695 - DNA, 25 bp, Artificial Sequence
  primer
gatcaagaaagtaaccaccaactga

SEQ ID NO: 113696 - DNA, 25 bp, Artificial Sequence
  primer
tctgtattccatttctccttatccc

SEQ ID NO: 113697 - DNA, 20 bp, Artificial Sequence
  primer
tgggtgacagagagactccg

SEQ ID NO: 113698 - DNA, 38 bp, Artificial Sequence
  primer
gtaaaacgacggccagtacttgagcattgtggatcacg

SEQ ID NO: 113699 - DNA, 21 bp, Artificial Sequence
  primer
caatatttgggtgtaatcggc

SEQ ID NO: 113700 - DNA, 37 bp, Artificial Sequence
  primer
gtaaaacgacggccagtacagaacaggcaccgacttg

SEQ ID NO: 113701 - DNA, 21 bp, Artificial Sequence
  primer
tgtggtctgtgctgactgttg

SEQ ID NO: 113702 - DNA, 21 bp, Artificial Sequence
  primer
gctccttggatcatatgttgg

SEQ ID NO: 113703 - DNA, 38 bp, Artificial Sequence
  primer
gtaaaacgacggccagtgcagtcctctgtttgtgcaag

SEQ ID NO: 113704 - DNA, 38 bp, Artificial Sequence
  primer
gtaaaacgacggccagttgaccaagtgggtagtcgttg

SEQ ID NO: 113705 - DNA, 21 bp, Artificial Sequence
  primer
tatcacccatttctctgtggc

SEQ ID NO: 113706 - DNA, 21 bp, Artificial Sequence
  primer
agctctgagtatccggcaatg

SEQ ID NO: 113707 - DNA, 21 bp, Artificial Sequence
  primer
ttgcagttacaaggaagaccc

SEQ ID NO: 113708 - DNA, 18 bp, Artificial Sequence
  primer
gtggcatgggcgtgttac

SEQ ID NO: 113709 - DNA, 21 bp, Artificial Sequence
  primer
cttcctaggacagcgtggatg

SEQ ID NO: 113710 - DNA, 41 bp, Artificial Sequence
  primer
gtaaaacgacggccagtcattcaagatgtagatgcttacgg

SEQ ID NO: 113711 - DNA, 18 bp, Artificial Sequence
  primer
gtccatcagcgtgcctcc

SEQ ID NO: 113712 - DNA, 21 bp, Artificial Sequence
  primer
gctcttgagcttcaggctctc

SEQ ID NO: 113713 - DNA, 21 bp, Artificial Sequence
  primer
agtgccaggcttgtgatcttc

SEQ ID NO: 113714 - DNA, 38 bp, Artificial Sequence
  primer
gtaaaacgacggccagtcactgattgactatccgctgc

SEQ ID NO: 113715 - DNA, 21 bp, Artificial Sequence
  primer
cttcccacagaacaagcacag

SEQ ID NO: 113716 - DNA, 21 bp, Artificial Sequence
  primer
gcagagagtgattgccatagg

SEQ ID NO: 113717 - DNA, 21 bp, Artificial Sequence
  primer
tcacgtggacgcagtgtttac

SEQ ID NO: 113718 - DNA, 41 bp, Artificial Sequence
  primer
gtaaaacgacggccagtaatgctatcaaggaagctacaagc

SEQ ID NO: 113719 - DNA, 21 bp, Artificial Sequence
  primer
gcggtctaaccttcttgcttg

SEQ ID NO: 113720 - DNA, 38 bp, Artificial Sequence
  primer
gtaaaacgacggccagtgacatgaacaagggtcaagcc

SEQ ID NO: 113721 - DNA, 21 bp, Artificial Sequence
  primer
gaggttgtgggctacagatcc

SEQ ID NO: 113722 - DNA, 38 bp, Artificial Sequence
  primer
gtaaaacgacggccagtatatgcccggcctctacttta

SEQ ID NO: 113723 - DNA, 23 bp, Artificial Sequence
  primer
tgacgtgtttgtttaaggcattc

SEQ ID NO: 113724 - DNA, 38 bp, Artificial Sequence
  primer
gtaaaacgacggccagtcacagaacccattcttcaagg

SEQ ID NO: 113725 - DNA, 38 bp, Artificial Sequence
  primer
gtaaaacgacggccagtgcacaggatatacgggctttc

SEQ ID NO: 113726 - DNA, 38 bp, Artificial Sequence
  primer
gtaaaacgacggccagtgagaggacatcctgatgctgg

SEQ ID NO: 113727 - DNA, 36 bp, Artificial Sequence
  primer
gtaaaacgacggccagtccagcccaacacggttaag

SEQ ID NO: 113728 - DNA, 20 bp, Artificial Sequence
  primer
cgcctggaacacactagctc

SEQ ID NO: 113729 - DNA, 27 bp, Artificial Sequence
  primer
tgaacctaatctttattagtctcaggc

SEQ ID NO: 113730 - DNA, 44 bp, Artificial Sequence
  primer
gtaaaacgacggccagttttgtctaatctagtctcaatccatcc

SEQ ID NO: 113731 - DNA, 21 bp, Artificial Sequence
  primer
acttggctgggagaaatctgg

SEQ ID NO: 113732 - DNA, 25 bp, Artificial Sequence
  primer
tcagggaaatctatttcaggttagc

SEQ ID NO: 113733 - DNA, 37 bp, Artificial Sequence
  primer
gtaaaacgacggccagtcccaaagctgaatgaccatc

SEQ ID NO: 113734 - DNA, 21 bp, Artificial Sequence
  primer
tggaagggtggaaggtacaag

SEQ ID NO: 113735 - DNA, 43 bp, Artificial Sequence
  primer
gtaaaacgacggccagtaatcataaatttcaatgtgctaatgc

SEQ ID NO: 113736 - DNA, 24 bp, Artificial Sequence
  primer
aatacatcaaatgcagctcttcaa

SEQ ID NO: 113737 - DNA, 21 bp, Artificial Sequence
  primer
tgctgtttctcaaccaccaat

SEQ ID NO: 113738 - DNA, 38 bp, Artificial Sequence
  primer
gtaaaacgacggccagtcagtgggcaagactgtgagag

SEQ ID NO: 113739 - DNA, 18 bp, Artificial Sequence
  primer
tttgccaaatgacgcagc

SEQ ID NO: 113740 - DNA, 21 bp, Artificial Sequence
  primer
gacggagatattccaggatgc

SEQ ID NO: 113741 - DNA, 21 bp, Artificial Sequence
  primer
catgatgggctgtttctcaac

SEQ ID NO: 113742 - DNA, 38 bp, Artificial Sequence
  primer
gtaaaacgacggccagtagcctagagagtgggcaatgg

SEQ ID NO: 113743 - DNA, 21 bp, Artificial Sequence
  primer
tggacttcagtcatacaggcg

SEQ ID NO: 113744 - DNA, 21 bp, Artificial Sequence
  primer
atgtcatctgaatgccttccc

SEQ ID NO: 113745 - DNA, 37 bp, Artificial Sequence
  primer
gtaaaacgacggccagttacagccagaccaaacggag

SEQ ID NO: 113746 - DNA, 21 bp, Artificial Sequence
  primer
ctccgagaaacacccaagaat

SEQ ID NO: 113747 - DNA, 24 bp, Artificial Sequence
  primer
cattgctaccattactaccaccac

SEQ ID NO: 113748 - DNA, 21 bp, Artificial Sequence
  primer
gctgtgtgctgatacaaaggg

SEQ ID NO: 113749 - DNA, 21 bp, Artificial Sequence
  primer
caacactctgcgttctgtgtg

SEQ ID NO: 113750 - DNA, 38 bp, Artificial Sequence
  primer
gtaaaacgacggccagtatatgggatgggactggacac

SEQ ID NO: 113751 - DNA, 21 bp, Artificial Sequence
  primer
gggttacccacgtagcatttc

SEQ ID NO: 113752 - DNA, 21 bp, Artificial Sequence
  primer
ttcaggtgaatgggaaaggac

SEQ ID NO: 113753 - DNA, 37 bp, Artificial Sequence
  primer
gtaaaacgacggccagtacagtgggcagcagtgtttg

SEQ ID NO: 113754 - DNA, 38 bp, Artificial Sequence
  primer
gtaaaacgacggccagtaccaatacgaaggcaatggag

SEQ ID NO: 113755 - DNA, 38 bp, Artificial Sequence
  primer
gtaaaacgacggccagtaagctaggaccgtgctgtctc

SEQ ID NO: 113756 - DNA, 39 bp, Artificial Sequence
  primer
gtaaaacgacggccagtccgaatgcctcagagaattaag

SEQ ID NO: 113757 - DNA, 22 bp, Artificial Sequence
  primer
ggcaacagagaatctgagcttt

SEQ ID NO: 113758 - DNA, 23 bp, Artificial Sequence
  primer
gaatacttctctccgagcatgag

SEQ ID NO: 113759 - DNA, 24 bp, Artificial Sequence
  primer
tgaagcccaaagtaaattaccaaa

SEQ ID NO: 113760 - DNA, 23 bp, Artificial Sequence
  primer
aaatgaccaaaggaggaccatac

SEQ ID NO: 113761 - DNA, 22 bp, Artificial Sequence
  primer
gagagatctcccttggattctg

SEQ ID NO: 113762 - DNA, 42 bp, Artificial Sequence
  primer
gtaaaacgacggccagttgttgttaaagcatctaccctatgc

SEQ ID NO: 113763 - DNA, 44 bp, Artificial Sequence
  primer
gtaaaacgacggccagtcttggaatgtatgtcacagataaagtt

SEQ ID NO: 113764 - DNA, 21 bp, Artificial Sequence
  primer
aaagggaggaggagctagcag

SEQ ID NO: 113765 - DNA, 41 bp, Artificial Sequence
  primer
gtaaaacgacggccagttgagaacatttcactaatggcatc

SEQ ID NO: 113766 - DNA, 39 bp, Artificial Sequence
  primer
gtaaaacgacggccagttgtggctatcttacatggctga

SEQ ID NO: 113767 - DNA, 39 bp, Artificial Sequence
  primer
gtaaaacgacggccagtcacatagcaaactttccagtca

SEQ ID NO: 113768 - DNA, 20 bp, Artificial Sequence
  primer
tgggcagtaagagtggaacc

SEQ ID NO: 113769 - DNA, 22 bp, Artificial Sequence
  primer
gaaaggcacactgtcagagaga

SEQ ID NO: 113770 - DNA, 18 bp, Artificial Sequence
  primer
tgcactccaggtccatcc

SEQ ID NO: 113771 - DNA, 38 bp, Artificial Sequence
  primer
gtaaaacgacggccagtattgtaaagcaccatggcaag

SEQ ID NO: 113772 - DNA, 38 bp, Artificial Sequence
  primer
gtaaaacgacggccagtacctgctgcagctcttgaaac

SEQ ID NO: 113773 - DNA, 38 bp, Artificial Sequence
  primer
gtaaaacgacggccagtatcactcagaatccctccacc

SEQ ID NO: 113774 - DNA, 21 bp, Artificial Sequence
  primer
cactggaacaaagttgcttgg

SEQ ID NO: 113775 - DNA, 25 bp, Artificial Sequence
  primer
aatatggaggatggaagagtaactg

SEQ ID NO: 113776 - DNA, 42 bp, Artificial Sequence
  primer
gtaaaacgacggccagtgctgtatctatcctaccagtcttgc

SEQ ID NO: 113777 - DNA, 40 bp, Artificial Sequence
  primer
gtaaaacgacggccagtgataaactgagatgcagggagag

SEQ ID NO: 113778 - DNA, 38 bp, Artificial Sequence
  primer
gtaaaacgacggccagtcactgcctaggctggatgata

SEQ ID NO: 113779 - DNA, 21 bp, Artificial Sequence
  primer
actccagaggaaagggcaaag

SEQ ID NO: 113780 - DNA, 39 bp, Artificial Sequence
  primer
gtaaaacgacggccagtaacctgaaggtcacttcacagc

SEQ ID NO: 113781 - DNA, 37 bp, Artificial Sequence
  primer
gtaaaacgacggccagtatttaatcgggccagcaaac

SEQ ID NO: 113782 - DNA, 43 bp, Artificial Sequence
  primer
gtaaaacgacggccagttgaatgaaagagggaaatatttgatg

SEQ ID NO: 113783 - DNA, 36 bp, Artificial Sequence
  primer
gtaaaacgacggccagtcctgtgggaaacttccagg

SEQ ID NO: 113784 - DNA, 38 bp, Artificial Sequence
  primer
gtaaaacgacggccagttgcaaagtcatttcaggaagc

SEQ ID NO: 113785 - DNA, 41 bp, Artificial Sequence
  primer
gtaaaacgacggccagttcatacgactatcgtggcataaac

SEQ ID NO: 113786 - DNA, 22 bp, Artificial Sequence
  primer
cagcctgaactgacaaagacag

SEQ ID NO: 113787 - DNA, 39 bp, Artificial Sequence
  primer
gtaaaacgacggccagtttccagaagttaaccaagaggg

SEQ ID NO: 113788 - DNA, 38 bp, Artificial Sequence
  primer
gtaaaacgacggccagtaggttgaatgggacccagaag

SEQ ID NO: 113789 - DNA, 21 bp, Artificial Sequence
  primer
gtgagcagaggcggattctac

SEQ ID NO: 113790 - DNA, 39 bp, Artificial Sequence
  primer
gtaaaacgacggccagtgacagagacagggagagaaagg

SEQ ID NO: 113791 - DNA, 42 bp, Artificial Sequence
  primer
gtaaaacgacggccagtccactttcctttgtaattaaggtgc

SEQ ID NO: 113792 - DNA, 38 bp, Artificial Sequence
  primer
gtaaaacgacggccagtcacgttctttggacatgaacc

SEQ ID NO: 113793 - DNA, 21 bp, Artificial Sequence
  primer
ctgttgctacatggtgttgcc

SEQ ID NO: 113794 - DNA, 20 bp, Artificial Sequence
  primer
tctcccaccttcttcttccc

SEQ ID NO: 113795 - DNA, 21 bp, Artificial Sequence
  primer
accacttgcagctttactccc

SEQ ID NO: 113796 - DNA, 21 bp, Artificial Sequence
  primer
gctgtgttgtttgcctaggtg

SEQ ID NO: 113797 - DNA, 21 bp, Artificial Sequence
  primer
ttagtgcccatactcagcagg

SEQ ID NO: 113798 - DNA, 21 bp, Artificial Sequence
  primer
cagctaatcggaaatggttgg

SEQ ID NO: 113799 - DNA, 24 bp, Artificial Sequence
  primer
cattgctctaaggtgattctctgc

SEQ ID NO: 113800 - DNA, 21 bp, Artificial Sequence
  primer
ttcccatttgtaagcattccc

SEQ ID NO: 113801 - DNA, 21 bp, Artificial Sequence
  primer
caagtacaccaggcccagaac

SEQ ID NO: 113802 - DNA, 21 bp, Artificial Sequence
  primer
gccttccttcatactgcaatg

SEQ ID NO: 113803 - DNA, 21 bp, Artificial Sequence
  primer
tggtccatacctgctcatacc

SEQ ID NO: 113804 - DNA, 36 bp, Artificial Sequence
  primer
gtaaaacgacggccagtagctgcaatgctagggctc

SEQ ID NO: 113805 - DNA, 21 bp, Artificial Sequence
  primer
catcctctaaatgcaggtccc

SEQ ID NO: 113806 - DNA, 21 bp, Artificial Sequence
  primer
gccctcagatctaatggaagg

SEQ ID NO: 113807 - DNA, 38 bp, Artificial Sequence
  primer
gtaaaacgacggccagttaggctgtgagttggaacagg

SEQ ID NO: 113808 - DNA, 38 bp, Artificial Sequence
  primer
gtaaaacgacggccagtgaggtttaggcggagtaaggg

SEQ ID NO: 113809 - DNA, 21 bp, Artificial Sequence
  primer
tatggcaagtcttcacgatgg

SEQ ID NO: 113810 - DNA, 38 bp, Artificial Sequence
  primer
gtaaaacgacggccagttgccatactacaaggagcctg

SEQ ID NO: 113811 - DNA, 38 bp, Artificial Sequence
  primer
gtaaaacgacggccagtcggaggaagtaaggtctctcg

SEQ ID NO: 113812 - DNA, 38 bp, Artificial Sequence
  primer
gtaaaacgacggccagttggtcaagtggctttgttacc

SEQ ID NO: 113813 - DNA, 20 bp, Artificial Sequence
  primer
ataagaagggctgggttggc

SEQ ID NO: 113814 - DNA, 21 bp, Artificial Sequence
  primer
aaaggaatcaaggcacaaacg

SEQ ID NO: 113815 - DNA, 38 bp, Artificial Sequence
  primer
gtaaaacgacggccagttctgataggacagagccagcc

SEQ ID NO: 113816 - DNA, 37 bp, Artificial Sequence
  primer
gtaaaacgacggccagtgccctcccactttgagtagc

SEQ ID NO: 113817 - DNA, 37 bp, Artificial Sequence
  primer
gtaaaacgacggccagtgtgccatgagtcaagccttc

SEQ ID NO: 113818 - DNA, 39 bp, Artificial Sequence
  primer
gtaaaacgacggccagtccctagaatctgatcccagacc

SEQ ID NO: 113819 - DNA, 39 bp, Artificial Sequence
  primer
gtaaaacgacggccagttggaaggataaggatccaagtg

SEQ ID NO: 113820 - DNA, 21 bp, Artificial Sequence
  primer
gcccagcaaatcactttcttc

SEQ ID NO: 113821 - DNA, 21 bp, Artificial Sequence
  primer
aaagcaactggaaactccgtg

SEQ ID NO: 113822 - DNA, 38 bp, Artificial Sequence
  primer
gtaaaacgacggccagtgggacaggaatgaagagggag

SEQ ID NO: 113823 - DNA, 38 bp, Artificial Sequence
  primer
gtaaaacgacggccagtagatgcaaggagaattgggac

SEQ ID NO: 113824 - DNA, 37 bp, Artificial Sequence
  primer
gtaaaacgacggccagtaggacaccataggcaggacc

SEQ ID NO: 113825 - DNA, 21 bp, Artificial Sequence
  primer
tgggtacaggaccacagagag

SEQ ID NO: 113826 - DNA, 20 bp, Artificial Sequence
  primer
caccagggtctcctaccttg

SEQ ID NO: 113827 - DNA, 21 bp, Artificial Sequence
  primer
tttcctcgtattccatctccc

SEQ ID NO: 113828 - DNA, 21 bp, Artificial Sequence
  primer
agttaccctgggtgaaggagg

SEQ ID NO: 113829 - DNA, 38 bp, Artificial Sequence
  primer
gtaaaacgacggccagtaaacaggatgctgtcgttgac

SEQ ID NO: 113830 - DNA, 20 bp, Artificial Sequence
  primer
tatctcctgggatgtgctgg

SEQ ID NO: 113831 - DNA, 21 bp, Artificial Sequence
  primer
acaaatggcccaagacagaag

SEQ ID NO: 113832 - DNA, 21 bp, Artificial Sequence
  primer
agagggacagctacagggatg

SEQ ID NO: 113833 - DNA, 18 bp, Artificial Sequence
  primer
gtcccgcaagaggactcg

SEQ ID NO: 113834 - DNA, 38 bp, Artificial Sequence
  primer
gtaaaacgacggccagtggaggtttctgagctctgtcc

SEQ ID NO: 113835 - DNA, 21 bp, Artificial Sequence
  primer
caaatgttaacctgtgcagcc

SEQ ID NO: 113836 - DNA, 38 bp, Artificial Sequence
  primer
gtaaaacgacggccagttaggagttcagagggcaaacc

SEQ ID NO: 113837 - DNA, 21 bp, Artificial Sequence
  primer
aactcagtgctcctctcaccc

SEQ ID NO: 113838 - DNA, 20 bp, Artificial Sequence
  primer
accttccatctgcgtcactg

SEQ ID NO: 113839 - DNA, 21 bp, Artificial Sequence
  primer
ggagagaagatcatcgttggc

SEQ ID NO: 113840 - DNA, 38 bp, Artificial Sequence
  primer
gtaaaacgacggccagtactatggaatgagagggtggc

SEQ ID NO: 113841 - DNA, 21 bp, Artificial Sequence
  primer
agacccagcagggaaagagac

SEQ ID NO: 113842 - DNA, 38 bp, Artificial Sequence
  primer
gtaaaacgacggccagtaagggagagttgaacgcagac

SEQ ID NO: 113843 - DNA, 38 bp, Artificial Sequence
  primer
gtaaaacgacggccagtctttctaagccatccactggg

SEQ ID NO: 113844 - DNA, 19 bp, Artificial Sequence
  primer
aagggcttgggcaattcag

SEQ ID NO: 113845 - DNA, 20 bp, Artificial Sequence
  primer
tgggtttctgatgatgggag

SEQ ID NO: 113846 - DNA, 21 bp, Artificial Sequence
  primer
agcatttctggacatgaggtg

SEQ ID NO: 113847 - DNA, 38 bp, Artificial Sequence
  primer
gtaaaacgacggccagttaggcagactgcttgctcttg

SEQ ID NO: 113848 - DNA, 38 bp, Artificial Sequence
  primer
gtaaaacgacggccagtctcaccttggtcttccaaagc

SEQ ID NO: 113849 - DNA, 22 bp, Artificial Sequence
  primer
tgtttcctggtcagaagcattt

SEQ ID NO: 113850 - DNA, 35 bp, Artificial Sequence
  primer
gtaaaacgacggccagtctaatccggacaccacgc

SEQ ID NO: 113851 - DNA, 21 bp, Artificial Sequence
  primer
aggtccctcccactttacctg

SEQ ID NO: 113852 - DNA, 38 bp, Artificial Sequence
  primer
gtaaaacgacggccagtgaagtgaagggacaaacagcc

SEQ ID NO: 113853 - DNA, 38 bp, Artificial Sequence
  primer
gtaaaacgacggccagtaactgggagatactgcaagcg

SEQ ID NO: 113854 - DNA, 22 bp, Artificial Sequence
  primer
tcacctaagtgctacctggctc

SEQ ID NO: 113855 - DNA, 21 bp, Artificial Sequence
  primer
ctcatccctgtgaatgaggtg

SEQ ID NO: 113856 - DNA, 21 bp, Artificial Sequence
  primer
agtacaatgcccacaacaagg

SEQ ID NO: 113857 - DNA, 38 bp, Artificial Sequence
  primer
gtaaaacgacggccagtgtaaatgcccaccctgttctc

SEQ ID NO: 113858 - DNA, 21 bp, Artificial Sequence
  primer
gctgttggagccttcagagtc

SEQ ID NO: 113859 - DNA, 21 bp, Artificial Sequence
  primer
accagagtggcttctgactcg

SEQ ID NO: 113860 - DNA, 21 bp, Artificial Sequence
  primer
tccaggaactgagcaggaatc

SEQ ID NO: 113861 - DNA, 37 bp, Artificial Sequence
  primer
gtaaaacgacggccagtccacttagcagccctccttc

SEQ ID NO: 113862 - DNA, 37 bp, Artificial Sequence
  primer
gtaaaacgacggccagtatggcagctctctgaaatgc

SEQ ID NO: 113863 - DNA, 21 bp, Artificial Sequence
  primer
ggaagcttctccaccaatgag

SEQ ID NO: 113864 - DNA, 21 bp, Artificial Sequence
  primer
gcccttcccagtagagaaatg

SEQ ID NO: 113865 - DNA, 20 bp, Artificial Sequence
  primer
ccagagactccaccatgagg

SEQ ID NO: 113866 - DNA, 38 bp, Artificial Sequence
  primer
gtaaaacgacggccagttcaagctactcctgctgcttc

SEQ ID NO: 113867 - DNA, 38 bp, Artificial Sequence
  primer
gtaaaacgacggccagttgttccctaggaggaggagag

SEQ ID NO: 113868 - DNA, 37 bp, Artificial Sequence
  primer
gtaaaacgacggccagtaatccagggctggtcaactc

SEQ ID NO: 113869 - DNA, 21 bp, Artificial Sequence
  primer
ccaactcctgaagacctggtg

SEQ ID NO: 113870 - DNA, 38 bp, Artificial Sequence
  primer
gtaaaacgacggccagtgtactcctccgtctttggtgc

SEQ ID NO: 113871 - DNA, 21 bp, Artificial Sequence
  primer
aacagagagccattcaccagg

SEQ ID NO: 113872 - DNA, 21 bp, Artificial Sequence
  primer
aagaagcagaatccctcctcc

SEQ ID NO: 113873 - DNA, 38 bp, Artificial Sequence
  primer
gtaaaacgacggccagttttaagtccctgttgtggagc

SEQ ID NO: 113874 - DNA, 38 bp, Artificial Sequence
  primer
gtaaaacgacggccagttggaacactgtgaaatctgcc

SEQ ID NO: 113875 - DNA, 20 bp, Artificial Sequence
  primer
gtgggctcactgaaggtctg

SEQ ID NO: 113876 - DNA, 38 bp, Artificial Sequence
  primer
gtaaaacgacggccagtacacaccctgctccctacttg

SEQ ID NO: 113877 - DNA, 38 bp, Artificial Sequence
  primer
gtaaaacgacggccagtacagcacttgggagcatgtag

SEQ ID NO: 113878 - DNA, 38 bp, Artificial Sequence
  primer
gtaaaacgacggccagtcgcatgttcatagacggacag

SEQ ID NO: 113879 - DNA, 23 bp, Artificial Sequence
  primer
gacacagtgagaccctgtctctt

SEQ ID NO: 113880 - DNA, 44 bp, Artificial Sequence
  primer
gtaaaacgacggccagtaccaaccagttaataatgagactaagg

SEQ ID NO: 113881 - DNA, 21 bp, Artificial Sequence
  primer
tctcatacggaatgttggagc

SEQ ID NO: 113882 - DNA, 23 bp, Artificial Sequence
  primer
aacaaacgaacaaattccagttg

SEQ ID NO: 113883 - DNA, 38 bp, Artificial Sequence
  primer
gtaaaacgacggccagttaaccagatgtcagggcacag

SEQ ID NO: 113884 - DNA, 21 bp, Artificial Sequence
  primer
tggctaattcccacatacagg

SEQ ID NO: 113885 - DNA, 20 bp, Artificial Sequence
  primer
agagcgaactccgtctgaaa

SEQ ID NO: 113886 - DNA, 21 bp, Artificial Sequence
  primer
ctgaccctgagttcacatccc

SEQ ID NO: 113887 - DNA, 21 bp, Artificial Sequence
  primer
tatgtggttgggtcacagtgc

SEQ ID NO: 113888 - DNA, 25 bp, Artificial Sequence
  primer
tcaaaggaacgacagtcaatattct

SEQ ID NO: 113889 - DNA, 21 bp, Artificial Sequence
  primer
tgggagaagaggacatcagtc

SEQ ID NO: 113890 - DNA, 21 bp, Artificial Sequence
  primer
tgttgatcgatttccttgctc

SEQ ID NO: 113891 - DNA, 38 bp, Artificial Sequence
  primer
gtaaaacgacggccagtcagtgtttgtgagcgagcata

SEQ ID NO: 113892 - DNA, 21 bp, Artificial Sequence
  primer
ctgcctatatgttgcagggtc

SEQ ID NO: 113893 - DNA, 37 bp, Artificial Sequence
  primer
gtaaaacgacggccagttttccaacggaaattctggg

SEQ ID NO: 113894 - DNA, 23 bp, Artificial Sequence
  primer
gagggaattgttctaattcaggg

SEQ ID NO: 113895 - DNA, 40 bp, Artificial Sequence
  primer
gtaaaacgacggccagttcaagtacccagtttgtcagagc

SEQ ID NO: 113896 - DNA, 21 bp, Artificial Sequence
  primer
cccacttcccttgagaaagag

SEQ ID NO: 113897 - DNA, 21 bp, Artificial Sequence
  primer
ctcttgctgcgaggtgtagtg

SEQ ID NO: 113898 - DNA, 38 bp, Artificial Sequence
  primer
gtaaaacgacggccagtcgacttggtgaagagcttctg

SEQ ID NO: 113899 - DNA, 38 bp, Artificial Sequence
  primer
gtaaaacgacggccagtcatgtcaccatccaggttgtc

SEQ ID NO: 113900 - DNA, 21 bp, Artificial Sequence
  primer
ctgacacgactcggacttcac

SEQ ID NO: 113901 - DNA, 38 bp, Artificial Sequence
  primer
gtaaaacgacggccagtgatgccgaataatttgcacag

SEQ ID NO: 113902 - DNA, 37 bp, Artificial Sequence
  primer
gtaaaacgacggccagtgacacaccatctgagcctcg

SEQ ID NO: 113903 - DNA, 21 bp, Artificial Sequence
  primer
tcatgccctctcaattctcac

SEQ ID NO: 113904 - DNA, 21 bp, Artificial Sequence
  primer
tatgtgtgttgacagcaaggg

SEQ ID NO: 113905 - DNA, 38 bp, Artificial Sequence
  primer
gtaaaacgacggccagtagatctatgattccaagcggc

SEQ ID NO: 113906 - DNA, 25 bp, Artificial Sequence
  primer
tcaacttcaccctttaaatactccc

SEQ ID NO: 113907 - DNA, 21 bp, Artificial Sequence
  primer
acaggcatggtaatggtttcc

SEQ ID NO: 113908 - DNA, 21 bp, Artificial Sequence
  primer
tctcctgcatgttctggtttg

SEQ ID NO: 113909 - DNA, 38 bp, Artificial Sequence
  primer
gtaaaacgacggccagtctccaatggaccttgacttgg

SEQ ID NO: 113910 - DNA, 21 bp, Artificial Sequence
  primer
agcaggactgaatgcagaagc

SEQ ID NO: 113911 - DNA, 37 bp, Artificial Sequence
  primer
gtaaaacgacggccagtgacagtggaagtcaccgagc

SEQ ID NO: 113912 - DNA, 38 bp, Artificial Sequence; identical to SEQ ID NO: 113898
  primer

SEQ ID NO: 113913 - DNA, 38 bp, Artificial Sequence
  primer
gtaaaacgacggccagtcacttgacgtcgttgttgctc

SEQ ID NO: 113914 - DNA, 38 bp, Artificial Sequence
  primer
gtaaaacgacggccagtacgacaataccacctgctgtg

SEQ ID NO: 113915 - DNA, 39 bp, Artificial Sequence
  primer
gtaaaacgacggccagtcctgttgcacaacctaaatgtg

SEQ ID NO: 113916 - DNA, 21 bp, Artificial Sequence
  primer
taaatggatggcactcagctc

SEQ ID NO: 113917 - DNA, 20 bp, Artificial Sequence
  primer
agccagagctaattccaggg

SEQ ID NO: 113918 - DNA, 38 bp, Artificial Sequence
  primer
gtaaaacgacggccagtttgtactgtggtgctgtgtgc

SEQ ID NO: 113919 - DNA, 21 bp, Artificial Sequence
  primer
cagtcagtgctaaggacccag

SEQ ID NO: 113920 - DNA, 21 bp, Artificial Sequence
  primer
catagaatcaggacagaggcg

SEQ ID NO: 113921 - DNA, 21 bp, Artificial Sequence
  primer
atctaggagcttccatcaggc

SEQ ID NO: 113922 - DNA, 21 bp, Artificial Sequence
  primer
cagccttccatcctctttgtc

SEQ ID NO: 113923 - DNA, 22 bp, Artificial Sequence
  primer
gcctgagctcttactttcctcc

SEQ ID NO: 113924 - DNA, 20 bp, Artificial Sequence
  primer
acgtgatattccgcataccg

SEQ ID NO: 113925 - DNA, 38 bp, Artificial Sequence
  primer
gtaaaacgacggccagtagagggaaatttgctcgtgtg

SEQ ID NO: 113926 - DNA, 21 bp, Artificial Sequence
  primer
ggaggaggagacagaaaccac

SEQ ID NO: 113927 - DNA, 21 bp, Artificial Sequence
  primer
agctgcttctcaaactggtcc

SEQ ID NO: 113928 - DNA, 36 bp, Artificial Sequence
  primer
gtaaaacgacggccagtgtcctccatgccacccttc

SEQ ID NO: 113929 - DNA, 21 bp, Artificial Sequence
  primer
tgtaggcgtgcatgaagtagc

SEQ ID NO: 113930 - DNA, 38 bp, Artificial Sequence
  primer
gtaaaacgacggccagtgcatgaccagtggaaggactc

SEQ ID NO: 113931 - DNA, 20 bp, Artificial Sequence
  primer
ccagggagcaagactcgtag

SEQ ID NO: 113932 - DNA, 21 bp, Artificial Sequence
  primer
tcaggaacaaggaccaaacag

SEQ ID NO: 113933 - DNA, 38 bp, Artificial Sequence
  primer
gtaaaacgacggccagtatgtgaccctcaactccatcc

SEQ ID NO: 113934 - DNA, 21 bp, Artificial Sequence
  primer
gattcctccctgtatcctccc

SEQ ID NO: 113935 - DNA, 21 bp, Artificial Sequence
  primer
ggtactgctgtccaggctgtc

SEQ ID NO: 113936 - DNA, 38 bp, Artificial Sequence
  primer
gtaaaacgacggccagtctatgggtggaattcggtttg

SEQ ID NO: 113937 - DNA, 38 bp, Artificial Sequence
  primer
gtaaaacgacggccagtattcacattagtgggacgacg

SEQ ID NO: 113938 - DNA, 39 bp, Artificial Sequence
  primer
gtaaaacgacggccagttgcctgcagtagctttaggaac

SEQ ID NO: 113939 - DNA, 39 bp, Artificial Sequence
  primer
gtaaaacgacggccagtgcgaagaaagtaagaagggagc

SEQ ID NO: 113940 - DNA, 21 bp, Artificial Sequence
  primer
gcgctgtgtgtgttacagagg

SEQ ID NO: 113941 - DNA, 37 bp, Artificial Sequence
  primer
gtaaaacgacggccagtcagctcaaagacgacacacg

SEQ ID NO: 113942 - DNA, 38 bp, Artificial Sequence
  primer
gtaaaacgacggccagttttgaaagttggctcagggtc

SEQ ID NO: 113943 - DNA, 20 bp, Artificial Sequence
  primer
gtgccctccacacactcaag

SEQ ID NO: 113944 - DNA, 38 bp, Artificial Sequence
  primer
gtaaaacgacggccagtgcaaggagaagtgggttaggg

SEQ ID NO: 113945 - DNA, 18 bp, Artificial Sequence
  primer
tggtgggtagggcgagac

SEQ ID NO: 113946 - DNA, 38 bp, Artificial Sequence
  primer
gtaaaacgacggccagtttctgcctgacttcacgactc

SEQ ID NO: 113947 - DNA, 21 bp, Artificial Sequence
  primer
tgaggaagtgaggaacaccag

SEQ ID NO: 113948 - DNA, 21 bp, Artificial Sequence
  primer
ttaggctgaaagggtctttgg

SEQ ID NO: 113949 - DNA, 38 bp, Artificial Sequence
  primer
gtaaaacgacggccagtggcttgcacagacactcgtag

SEQ ID NO: 113950 - DNA, 39 bp, Artificial Sequence
  primer
gtaaaacgacggccagtgagctctttcatggacaccttc

SEQ ID NO: 113951 - DNA, 38 bp, Artificial Sequence
  primer
gtaaaacgacggccagtctctgcggaactccaagaatc

SEQ ID NO: 113952 - DNA, 39 bp, Artificial Sequence
  primer
gtaaaacgacggccagtcacaaagattaggacagaccgc

SEQ ID NO: 113953 - DNA, 35 bp, Artificial Sequence
  primer
gtaaaacgacggccagtgtgcggagagcctggaag

SEQ ID NO: 113954 - DNA, 18 bp, Artificial Sequence
  primer
ctgctgggctggagtcct

SEQ ID NO: 113955 - DNA, 37 bp, Artificial Sequence
  primer
gtaaaacgacggccagtgagacattcagcacgggaag

SEQ ID NO: 113956 - DNA, 21 bp, Artificial Sequence
  primer
catctctacagtcccaagccc

SEQ ID NO: 113957 - DNA, 21 bp, Artificial Sequence
  primer
tttcgaatgatcacctagggc

SEQ ID NO: 113958 - DNA, 21 bp, Artificial Sequence
  primer
ttccagtgatcaaacagccag

SEQ ID NO: 113959 - DNA, 21 bp, Artificial Sequence
  primer
ctttccaaagttgctccaagg

SEQ ID NO: 113960 - DNA, 19 bp, Artificial Sequence
  primer
tccatcgagaattcctggc

SEQ ID NO: 113961 - DNA, 21 bp, Artificial Sequence
  primer
caggtgcaggagaagtcgttc

SEQ ID NO: 113962 - DNA, 21 bp, Artificial Sequence
  primer
tgagatgtccttctcacgctg

SEQ ID NO: 113963 - DNA, 21 bp, Artificial Sequence
  primer
tatagtccaccgctgggtagc

SEQ ID NO: 113964 - DNA, 37 bp, Artificial Sequence
  primer
gtaaaacgacggccagtagaaacggagcagtggttcc

SEQ ID NO: 113965 - DNA, 20 bp, Artificial Sequence
  primer
gccacaagacaaatgggaag

SEQ ID NO: 113966 - DNA, 38 bp, Artificial Sequence
  primer
gtaaaacgacggccagtgagaacctgctcggtctgaac

SEQ ID NO: 113967 - DNA, 38 bp, Artificial Sequence
  primer
gtaaaacgacggccagttttcaaagagaagatggcagg

SEQ ID NO: 113968 - DNA, 37 bp, Artificial Sequence
  primer
gtaaaacgacggccagtgaccttcaggtcgcactcac

SEQ ID NO: 113969 - DNA, 21 bp, Artificial Sequence
  primer
ttagggtcttggaagctggag

SEQ ID NO: 113970 - DNA, 21 bp, Artificial Sequence
  primer
gctgtcaacactcagcaccac

SEQ ID NO: 113971 - DNA, 39 bp, Artificial Sequence
  primer
gtaaaacgacggccagtagagtaccctgaagagggtgag

SEQ ID NO: 113972 - DNA, 39 bp, Artificial Sequence
  primer
gtaaaacgacggccagtagttattcccagatctcctccc

SEQ ID NO: 113973 - DNA, 21 bp, Artificial Sequence
  primer
attccaaccctggactgtctg

SEQ ID NO: 113974 - DNA, 19 bp, Artificial Sequence
  primer
aaggtagcgctgagggtcc

SEQ ID NO: 113975 - DNA, 37 bp, Artificial Sequence
  primer
gtaaaacgacggccagtgaccagggaaatgcatcaag

SEQ ID NO: 113976 - DNA, 21 bp, Artificial Sequence
  primer
catttcacggacagaatcgag

SEQ ID NO: 113977 - DNA, 39 bp, Artificial Sequence
  primer
gtaaaacgacggccagtttcaagattgaactccaaagcc

SEQ ID NO: 113978 - DNA, 36 bp, Artificial Sequence
  primer
gtaaaacgacggccagttattgcacagggaccgagg

SEQ ID NO: 113979 - DNA, 23 bp, Artificial Sequence
  primer
ggtgtgtgtacaaggaaatctgg

SEQ ID NO: 113980 - DNA, 38 bp, Artificial Sequence
  primer
gtaaaacgacggccagtgcaattgtgctctgagtccag

SEQ ID NO: 113981 - DNA, 21 bp, Artificial Sequence
  primer
tgtgaccaagaagctccactg

SEQ ID NO: 113982 - DNA, 21 bp, Artificial Sequence
  primer
aagtacattgccagggagtgc

SEQ ID NO: 113983 - DNA, 38 bp, Artificial Sequence
  primer
gtaaaacgacggccagtcttggaagatcatgggaaagc

SEQ ID NO: 113984 - DNA, 20 bp, Artificial Sequence
  primer
agggatgtgtgactgaaggc

SEQ ID NO: 113985 - DNA, 36 bp, Artificial Sequence
  primer
gtaaaacgacggccagtctcctctcctgaccctccc

SEQ ID NO: 113986 - DNA, 38 bp, Artificial Sequence
  primer
gtaaaacgacggccagtacaagttgttcatggcttccc

SEQ ID NO: 113987 - DNA, 38 bp, Artificial Sequence
  primer
gtaaaacgacggccagttcagctgcttaactgcttccc

SEQ ID NO: 113988 - DNA, 38 bp, Artificial Sequence
  primer
gtaaaacgacggccagtcaaggcagggttctgacctac

SEQ ID NO: 113989 - DNA, 38 bp, Artificial Sequence
  primer
gtaaaacgacggccagttggcaagttcacagtctgtcc

SEQ ID NO: 113990 - DNA, 19 bp, Artificial Sequence
  primer
ccgcagagaggccaagtag

SEQ ID NO: 113991 - DNA, 37 bp, Artificial Sequence
  primer
gtaaaacgacggccagtcctaccctaacaaggctggc

SEQ ID NO: 113992 - DNA, 23 bp, Artificial Sequence
  primer
cgtaagtccctcctgaactttcc

SEQ ID NO: 113993 - DNA, 18 bp, Artificial Sequence
  primer
tgcctgggtccatctgtg

SEQ ID NO: 113994 - DNA, 20 bp, Artificial Sequence
  primer
gaacctgaacctgggaggtg

SEQ ID NO: 113995 - DNA, 22 bp, Artificial Sequence
  primer
tgtaagctggaagctacttggc

SEQ ID NO: 113996 - DNA, 21 bp, Artificial Sequence
  primer
aggcagcagtggcttgaatag

SEQ ID NO: 113997 - DNA, 20 bp, Artificial Sequence
  primer
gtggtgcacacctgtaaccc

SEQ ID NO: 113998 - DNA, 38 bp, Artificial Sequence
  primer
gtaaaacgacggccagttcaaacttctgggctcaagtg

SEQ ID NO: 113999 - DNA, 21 bp, Artificial Sequence
  primer
aacacgatgatgaagggtgac

SEQ ID NO: 114000 - DNA, 22 bp, Artificial Sequence
  primer
gggctcatggtgtaggaggtag

SEQ ID NO: 114001 - DNA, 18 bp, Artificial Sequence
  primer
gtcccagtgcccttggtg

SEQ ID NO: 114002 - DNA, 38 bp, Artificial Sequence
  primer
gtaaaacgacggccagtttatgagaaacacaggcaccc

SEQ ID NO: 114003 - DNA, 21 bp, Artificial Sequence
  primer
ctggaggccagtgaagaaatc

SEQ ID NO: 114004 - DNA, 21 bp, Artificial Sequence
  primer
cacctgacatctccctctgtg

SEQ ID NO: 114005 - DNA, 20 bp, Artificial Sequence
  primer
atcccaacactttgtggcag

SEQ ID NO: 114006 - DNA, 25 bp, Artificial Sequence
  primer
caatggttaagtccctgtttctttc

SEQ ID NO: 114007 - DNA, 21 bp, Artificial Sequence
  primer
gcagctggaatgacaagagtc

SEQ ID NO: 114008 - DNA, 21 bp, Artificial Sequence
  primer
ttctacaaagcagccaacctg

SEQ ID NO: 114009 - DNA, 38 bp, Artificial Sequence
  primer
gtaaaacgacggccagttaggcatcaccacacccatac

SEQ ID NO: 114010 - DNA, 42 bp, Artificial Sequence
  primer
gtaaaacgacggccagtaaacaaatacctcttccctgacaag

SEQ ID NO: 114011 - DNA, 38 bp, Artificial Sequence
  primer
gtaaaacgacggccagtagccttggtctgttgatcctc

SEQ ID NO: 114012 - DNA, 21 bp, Artificial Sequence
  primer
tgccctccctagaataccttc

SEQ ID NO: 114013 - DNA, 21 bp, Artificial Sequence
  primer
ccagagcatggtaaactccac

SEQ ID NO: 114014 - DNA, 21 bp, Artificial Sequence
  primer
ccagatgatgctgatccagac

SEQ ID NO: 114015 - DNA, 20 bp, Artificial Sequence
  primer
gctctgcttccttgcttgag

SEQ ID NO: 114016 - DNA, 22 bp, Artificial Sequence
  primer
tgatattcgaaacctccactgc

SEQ ID NO: 114017 - DNA, 21 bp, Artificial Sequence
  primer
cagcgagcaacaaatgaagac

SEQ ID NO: 114018 - DNA, 38 bp, Artificial Sequence
  primer
gtaaaacgacggccagtgttccttcttccctctgggtc

SEQ ID NO: 114019 - DNA, 21 bp, Artificial Sequence
  primer
aacacgtttacccatccatcc

SEQ ID NO: 114020 - DNA, 20 bp, Artificial Sequence
  primer
tacgggatttctgtccaccc

SEQ ID NO: 114021 - DNA, 35 bp, Artificial Sequence
  primer
gtaaaacgacggccagtctgcaggagaggtgggtg

SEQ ID NO: 114022 - DNA, 19 bp, Artificial Sequence
  primer
tttggcttccagtccatgc

SEQ ID NO: 114023 - DNA, 20 bp, Artificial Sequence
  primer
cccaaaggcaagagttccag

SEQ ID NO: 114024 - DNA, 20 bp, Artificial Sequence
  primer
ctgagtggctaggacggagg

SEQ ID NO: 114025 - DNA, 38 bp, Artificial Sequence
  primer
gtaaaacgacggccagtcaggcgagggagaagtttagg

SEQ ID NO: 114026 - DNA, 22 bp, Artificial Sequence
  primer
caatccatcagtcattcacagc

SEQ ID NO: 114027 - DNA, 38 bp, Artificial Sequence
  primer
gtaaaacgacggccagtggtacaggctctgctccattc

SEQ ID NO: 114028 - DNA, 21 bp, Artificial Sequence
  primer
gcataagctttggctgggtag

SEQ ID NO: 114029 - DNA, 38 bp, Artificial Sequence
  primer
gtaaaacgacggccagttgagtcctactcccttctgcc

SEQ ID NO: 114030 - DNA, 21 bp, Artificial Sequence
  primer
cagtcccatcgagactgaacc

SEQ ID NO: 114031 - DNA, 25 bp, Artificial Sequence
  primer
cccatatgaattcctttctttatga

SEQ ID NO: 114032 - DNA, 20 bp, Artificial Sequence
  primer
ggttgtaggagttccctccg

SEQ ID NO: 114033 - DNA, 35 bp, Artificial Sequence
  primer
gtaaaacgacggccagtgtcgaggaagtgagcggg

SEQ ID NO: 114034 - DNA, 21 bp, Artificial Sequence
  primer
ctaggccaacaattcctcctg

SEQ ID NO: 114035 - DNA, 38 bp, Artificial Sequence
  primer
gtaaaacgacggccagttttcgcagatacaagcaggtc

SEQ ID NO: 114036 - DNA, 38 bp, Artificial Sequence
  primer
gtaaaacgacggccagtaagtgtagcacccatcccttg

SEQ ID NO: 114037 - DNA, 38 bp, Artificial Sequence
  primer
gtaaaacgacggccagtgtcctcctgcatcctgctaag

SEQ ID NO: 114038 - DNA, 38 bp, Artificial Sequence
  primer
gtaaaacgacggccagtccagaaccaaccctaggagac

SEQ ID NO: 114039 - DNA, 21 bp, Artificial Sequence
  primer
aacgcttctgaggagcaagac

SEQ ID NO: 114040 - DNA, 20 bp, Artificial Sequence
  primer
aggtatcagtgggaggcagg

SEQ ID NO: 114041 - DNA, 38 bp, Artificial Sequence
  primer
gtaaaacgacggccagtactctcagaaccctccactcg

SEQ ID NO: 114042 - DNA, 21 bp, Artificial Sequence
  primer
catcactgagatcctgccaag

SEQ ID NO: 114043 - DNA, 20 bp, Artificial Sequence
  primer
aacatgtgcaccagctcctc

SEQ ID NO: 114044 - DNA, 21 bp, Artificial Sequence
  primer
ctgcaggcactagagggagag

SEQ ID NO: 114045 - DNA, 39 bp, Artificial Sequence
  primer
gtaaaacgacggccagtgaacacaggcaaacctatctgc

SEQ ID NO: 114046 - DNA, 21 bp, Artificial Sequence
  primer
ccattcctcctgaatacctgc

SEQ ID NO: 114047 - DNA, 37 bp, Artificial Sequence
  primer
gtaaaacgacggccagtcagctgtgctcagcctcaac

SEQ ID NO: 114048 - DNA, 21 bp, Artificial Sequence
  primer
gttcagtcagcccaaacactg

SEQ ID NO: 114049 - DNA, 21 bp, Artificial Sequence
  primer
ttgcacatacacagagcaagg

SEQ ID NO: 114050 - DNA, 21 bp, Artificial Sequence
  primer
tccacactacctgagcacctg

SEQ ID NO: 114051 - DNA, 21 bp, Artificial Sequence
  primer
tttctatgccctctgcacctc

SEQ ID NO: 114052 - DNA, 38 bp, Artificial Sequence
  primer
gtaaaacgacggccagtagctcaagcaatctgcctacc

SEQ ID NO: 114053 - DNA, 38 bp, Artificial Sequence
  primer
gtaaaacgacggccagtgggctctgtggagtagggaag

SEQ ID NO: 114054 - DNA, 21 bp, Artificial Sequence
  primer
ctgtttatcacctgctgccac

SEQ ID NO: 114055 - DNA, 22 bp, Artificial Sequence
  primer
tggattcttagcagagagctga

SEQ ID NO: 114056 - DNA, 21 bp, Artificial Sequence
  primer
tgggatctcagttacacagcc

SEQ ID NO: 114057 - DNA, 21 bp, Artificial Sequence
  primer
tctaccttcctcccatgcaac

SEQ ID NO: 114058 - DNA, 22 bp, Artificial Sequence
  primer
cggtttcctaggagagagctaa

SEQ ID NO: 114059 - DNA, 21 bp, Artificial Sequence
  primer
ggcactgtggtgaagactcat

SEQ ID NO: 114060 - DNA, 21 bp, Artificial Sequence
  primer
cacacaggtaagaaggagggc

SEQ ID NO: 114061 - DNA, 21 bp, Artificial Sequence
  primer
cggtccaacaggagataggtc

SEQ ID NO: 114062 - DNA, 44 bp, Artificial Sequence
  primer
gtaaaacgacggccagtgaaacatagaagaatctttgagtgagg

SEQ ID NO: 114063 - DNA, 20 bp, Artificial Sequence
  primer
agttacacagccggtgttgg

SEQ ID NO: 114064 - DNA, 21 bp, Artificial Sequence
  primer
aacctctaagggttggccatt

SEQ ID NO: 114065 - DNA, 21 bp, Artificial Sequence
  primer
cacctggatgaggatgtttcc

SEQ ID NO: 114066 - DNA, 26 bp, Artificial Sequence
  primer
tgaggagatcagaatgtaattaggag

SEQ ID NO: 114067 - DNA, 21 bp, Artificial Sequence
  primer
ctgtaagggttgtccactggg

SEQ ID NO: 114068 - DNA, 21 bp, Artificial Sequence
  primer
tcagagattccaccttcctcc

SEQ ID NO: 114069 - DNA, 21 bp, Artificial Sequence
  primer
ccatcctcaaacatcaaaccc

SEQ ID NO: 114070 - DNA, 21 bp, Artificial Sequence
  primer
tgcaccaggtactgtagcaaa

SEQ ID NO: 114071 - DNA, 22 bp, Artificial Sequence
  primer
gaagcctcctgaaccctatgtc

SEQ ID NO: 114072 - DNA, 38 bp, Artificial Sequence
  primer
gtaaaacgacggccagtctccaacatctgacccaggac

SEQ ID NO: 114073 - DNA, 21 bp, Artificial Sequence
  primer
caggagaagctttgagtgagg

SEQ ID NO: 114074 - DNA, 21 bp, Artificial Sequence
  primer
ctatcagcaggcaatagcagg

SEQ ID NO: 114075 - DNA, 38 bp, Artificial Sequence
  primer
gtaaaacgacggccagtcagggctatgtgcagattgag

SEQ ID NO: 114076 - DNA, 38 bp, Artificial Sequence
  primer
gtaaaacgacggccagtgcccaggacacagtctaaacc

SEQ ID NO: 114077 - DNA, 21 bp, Artificial Sequence
  primer
cccttctttgatttccttggg

SEQ ID NO: 114078 - DNA, 37 bp, Artificial Sequence
  primer
gtaaaacgacggccagtccactggccttaagctcttg

SEQ ID NO: 114079 - DNA, 38 bp, Artificial Sequence
  primer
gtaaaacgacggccagtcttggagagtgagcaacatgc

SEQ ID NO: 114080 - DNA, 21 bp, Artificial Sequence
  primer
cattgtcactgaggaaatggg

SEQ ID NO: 114081 - DNA, 22 bp, Artificial Sequence
  primer
agcaaacttctctcctggcttt

SEQ ID NO: 114082 - DNA, 38 bp, Artificial Sequence
  primer
gtaaaacgacggccagtcaacaacaggacagttgagcc

SEQ ID NO: 114083 - DNA, 21 bp, Artificial Sequence
  primer
caagaagcacaggacataccg

SEQ ID NO: 114084 - DNA, 38 bp, Artificial Sequence
  primer
gtaaaacgacggccagttttgcattcttcaagcctttg

SEQ ID NO: 114085 - DNA, 21 bp, Artificial Sequence
  primer
caagaggaacatcccaagtcc

SEQ ID NO: 114086 - DNA, 21 bp, Artificial Sequence
  primer
tctcctctttgccttccagag

SEQ ID NO: 114087 - DNA, 21 bp, Artificial Sequence
  primer
agagatcagttgcaccttggc

SEQ ID NO: 114088 - DNA, 20 bp, Artificial Sequence
  primer
tcgcctctgacttgcttcac

SEQ ID NO: 114089 - DNA, 21 bp, Artificial Sequence
  primer
gttcagggtagctgatgcagg

SEQ ID NO: 114090 - DNA, 21 bp, Artificial Sequence
  primer
gtgtgtaggtgtgggcttcac

SEQ ID NO: 114091 - DNA, 21 bp, Artificial Sequence
  primer
ttagcatccttgccaaacaag

SEQ ID NO: 114092 - DNA, 19 bp, Artificial Sequence
  primer
gattgtcacagctgcaggg

SEQ ID NO: 114093 - DNA, 22 bp, Artificial Sequence
  primer
tcaattgctgttgctttgaaac

SEQ ID NO: 114094 - DNA, 23 bp, Artificial Sequence
  primer
caaacaaacccaaacttcaaatg

SEQ ID NO: 114095 - DNA, 25 bp, Artificial Sequence
  primer
tgttgataagacccatctgttaatg

SEQ ID NO: 114096 - DNA, 38 bp, Artificial Sequence
  primer
gtaaaacgacggccagtgaccagctgtataaccacggg

SEQ ID NO: 114097 - DNA, 43 bp, Artificial Sequence
  primer
gtaaaacgacggccagtacaaagtgattggagaacttaaacag

SEQ ID NO: 114098 - DNA, 27 bp, Artificial Sequence
  primer
gggcactttattatctaaggacttacc

SEQ ID NO: 114099 - DNA, 38 bp, Artificial Sequence
  primer
gtaaaacgacggccagtttggagtcgtgacaacatctg

SEQ ID NO: 114100 - DNA, 23 bp, Artificial Sequence
  primer
gctgcctcctgacattatattcc

SEQ ID NO: 114101 - DNA, 20 bp, Artificial Sequence
  primer
ctccatctcctgacctcgtg

SEQ ID NO: 114102 - DNA, 38 bp, Artificial Sequence
  primer
gtaaaacgacggccagttggctcacacctatagtccca

SEQ ID NO: 114103 - DNA, 24 bp, Artificial Sequence
  primer
aagatgtgaaattggagactgctt

SEQ ID NO: 114104 - DNA, 41 bp, Artificial Sequence
  primer
gtaaaacgacggccagttgcttctttgcaaactactgtgat

SEQ ID NO: 114105 - DNA, 37 bp, Artificial Sequence
  primer
gtaaaacgacggccagttttgccatatcttctgctgc

SEQ ID NO: 114106 - DNA, 43 bp, Artificial Sequence
  primer
gtaaaacgacggccagtattgctgtttcaatcagtacctagtc

SEQ ID NO: 114107 - DNA, 37 bp, Artificial Sequence
  primer
gtaaaacgacggccagtgccaaagccctcactcaaac

SEQ ID NO: 114108 - DNA, 22 bp, Artificial Sequence
  primer
cacatttgtttcacacgtcaag

SEQ ID NO: 114109 - DNA, 22 bp, Artificial Sequence
  primer
catgatctggaaccatactggg

SEQ ID NO: 114110 - DNA, 38 bp, Artificial Sequence
  primer
gtaaaacgacggccagttgctccatccatagggcatac

SEQ ID NO: 114111 - DNA, 27 bp, Artificial Sequence
  primer
gaaatgaatattgtagtcaatgaagca

SEQ ID NO: 114112 - DNA, 38 bp, Artificial Sequence
  primer
gtaaaacgacggccagtcaaagcagaatcacatgaggg

SEQ ID NO: 114113 - DNA, 20 bp, Artificial Sequence
  primer
gttggaatcccaagcacatc

SEQ ID NO: 114114 - DNA, 25 bp, Artificial Sequence
  primer
cgtaacttaaccatcaaaccacatc

SEQ ID NO: 114115 - DNA, 21 bp, Artificial Sequence
  primer
aagccattgcaacaaagattg

SEQ ID NO: 114116 - DNA, 24 bp, Artificial Sequence
  primer
ttctttaaatcacagcacttcagc

SEQ ID NO: 114117 - DNA, 24 bp, Artificial Sequence
  primer
ttaaagccagttgtgtgaatcttg

SEQ ID NO: 114118 - DNA, 42 bp, Artificial Sequence
  primer
gtaaaacgacggccagtttgaataatctatgatccaagcaaa

SEQ ID NO: 114119 - DNA, 21 bp, Artificial Sequence
  primer
ttctccaacaacaagacaggc

SEQ ID NO: 114120 - DNA, 21 bp, Artificial Sequence
  primer
tgacattacaggtacccgagg

SEQ ID NO: 114121 - DNA, 39 bp, Artificial Sequence
  primer
gtaaaacgacggccagttcacagataacaaagcacggag

SEQ ID NO: 114122 - DNA, 25 bp, Artificial Sequence
  primer
aatgaactcaaagttgaatttctcc

SEQ ID NO: 114123 - DNA, 41 bp, Artificial Sequence
  primer
gtaaaacgacggccagtagctaaatccttagaaggtgaacg

SEQ ID NO: 114124 - DNA, 25 bp, Artificial Sequence
  primer
catgttagtaccttctggatttccc

SEQ ID NO: 114125 - DNA, 40 bp, Artificial Sequence
  primer
gtaaaacgacggccagtcaatgggcaaactaccatacttg

SEQ ID NO: 114126 - DNA, 39 bp, Artificial Sequence
  primer
gtaaaacgacggccagtaaagatgctgaaggtcaaatgc

SEQ ID NO: 114127 - DNA, 22 bp, Artificial Sequence
  primer
ccagtagcatctaaccaccacc

SEQ ID NO: 114128 - DNA, 38 bp, Artificial Sequence
  primer
gtaaaacgacggccagtacggtgaagggagacattagg

SEQ ID NO: 114129 - DNA, 24 bp, Artificial Sequence
  primer
tctcttagaaccaggaaagagcag

SEQ ID NO: 114130 - DNA, 41 bp, Artificial Sequence
  primer
gtaaaacgacggccagtgcactggtatccatgttcttaacc

SEQ ID NO: 114131 - DNA, 39 bp, Artificial Sequence
  primer
gtaaaacgacggccagttccaaagtaccagtgctgagtg

SEQ ID NO: 114132 - DNA, 39 bp, Artificial Sequence
  primer
gtaaaacgacggccagtgcattggattgtctctgaaacc

SEQ ID NO: 114133 - DNA, 26 bp, Artificial Sequence
  primer
cctacctccaaatagtcaaatcagtg

SEQ ID NO: 114134 - DNA, 21 bp, Artificial Sequence
  primer
tgtcctcaaatccaatcttgc

SEQ ID NO: 114135 - DNA, 21 bp, Artificial Sequence
  primer
ggccacaatacatgtgccaat

SEQ ID NO: 114136 - DNA, 26 bp, Artificial Sequence
  primer
tctaatcatacataatttattgcccg

SEQ ID NO: 114137 - DNA, 39 bp, Artificial Sequence
  primer
gtaaaacgacggccagtctcctgctaaagcttaccattg

SEQ ID NO: 114138 - DNA, 26 bp, Artificial Sequence
  primer
tttcaaacacagaattgttactggtc

SEQ ID NO: 114139 - DNA, 43 bp, Artificial Sequence
  primer
gtaaaacgacggccagtgataaaggaaggaagaaaggattgtt

SEQ ID NO: 114140 - DNA, 38 bp, Artificial Sequence
  primer
gtaaaacgacggccagtctttcagagtactgcgcaacc

SEQ ID NO: 114141 - DNA, 44 bp, Artificial Sequence
  primer
gtaaaacgacggccagtcgtaagtgctcctatattaccatacca

SEQ ID NO: 114142 - DNA, 25 bp, Artificial Sequence
  primer
tttctgatgactaagtctgaagcag

SEQ ID NO: 114143 - DNA, 39 bp, Artificial Sequence
  primer
gtaaaacgacggccagtcaaggaaatgcatcaaatcaaa

SEQ ID NO: 114144 - DNA, 21 bp, Artificial Sequence
  primer
ccaaagtgagggaaaccactc

SEQ ID NO: 114145 - DNA, 39 bp, Artificial Sequence
  primer
gtaaaacgacggccagttgaagccaaccacactatcaag

SEQ ID NO: 114146 - DNA, 41 bp, Artificial Sequence
  primer
gtaaaacgacggccagttcagctcatttgtctgaattgttc

SEQ ID NO: 114147 - DNA, 21 bp, Artificial Sequence
  primer
tttccatcacccttcagaacc

SEQ ID NO: 114148 - DNA, 21 bp, Artificial Sequence
  primer
tgttagtgcctttcaccctgc

SEQ ID NO: 114149 - DNA, 38 bp, Artificial Sequence
  primer
gtaaaacgacggccagttgtgcactggttcagaactgc

SEQ ID NO: 114150 - DNA, 21 bp, Artificial Sequence
  primer
acaatccacataccagcctcc

SEQ ID NO: 114151 - DNA, 38 bp, Artificial Sequence
  primer
gtaaaacgacggccagtaatactccattgcagtggtcc

SEQ ID NO: 114152 - DNA, 20 bp, Artificial Sequence
  primer
aaagacagctttgcctctgc

SEQ ID NO: 114153 - DNA, 21 bp, Artificial Sequence
  primer
tccttgtgggtgtatctccag

SEQ ID NO: 114154 - DNA, 21 bp, Artificial Sequence
  primer
tggtgggaaatggtctaggag

SEQ ID NO: 114155 - DNA, 20 bp, Artificial Sequence
  primer
gctgcaagtggagaggtgac

SEQ ID NO: 114156 - DNA, 19 bp, Artificial Sequence
  primer
atgcgggaatcaggagttg

SEQ ID NO: 114157 - DNA, 20 bp, Artificial Sequence
  primer
aaagccgagggaagaggttc

SEQ ID NO: 114158 - DNA, 21 bp, Artificial Sequence
  primer
tggtgggaaatggtctaggag

SEQ ID NO: 114159 - DNA, 24 bp, Artificial Sequence
  primer
catgctttgcaactatataagccc

SEQ ID NO: 114160 - DNA, 38 bp, Artificial Sequence
  primer
gtaaaacgacggccagttagcctgggtgacagtgagac

SEQ ID NO: 114161 - DNA, 38 bp, Artificial Sequence
  primer
gtaaaacgacggccagtacaaatcctcatggtccatcc

SEQ ID NO: 114162 - DNA, 20 bp, Artificial Sequence
  primer
tcctccttgtccaaataccg

SEQ ID NO: 114163 - DNA, 43 bp, Artificial Sequence
  primer
gtaaaacgacggccagtccagttacttgtgctaagacaatgag

SEQ ID NO: 114164 - DNA, 21 bp, Artificial Sequence
  primer
ttgacccttgggtgagaagag

SEQ ID NO: 114165 - DNA, 22 bp, Artificial Sequence
  primer
gcacaaactgatttatgcatgg

SEQ ID NO: 114166 - DNA, 39 bp, Artificial Sequence
  primer
gtaaaacgacggccagttgggaagataacactgcactca

SEQ ID NO: 114167 - DNA, 27 bp, Artificial Sequence
  primer
cctatcctcacaaatattaccatgaac

SEQ ID NO: 114168 - DNA, 37 bp, Artificial Sequence
  primer
gtaaaacgacggccagtaatgatccaattggccttcc

SEQ ID NO: 114169 - DNA, 36 bp, Artificial Sequence
  primer
gtaaaacgacggccagttaggccaggctaatgtcgc

SEQ ID NO: 114170 - DNA, 21 bp, Artificial Sequence
  primer
taggaaggtgccactgctttc

SEQ ID NO: 114171 - DNA, 38 bp, Artificial Sequence
  primer
gtaaaacgacggccagttgcaacaggaattgtgacagc

SEQ ID NO: 114172 - DNA, 38 bp, Artificial Sequence
  primer
gtaaaacgacggccagtagcattaggtccacagcttcc

SEQ ID NO: 114173 - DNA, 41 bp, Artificial Sequence
  primer
gtaaaacgacggccagtaagaacagtctgtcatttcccatc

SEQ ID NO: 114174 - DNA, 21 bp, Artificial Sequence
  primer
ccaaatcccatacctactgcc

SEQ ID NO: 114175 - DNA, 21 bp, Artificial Sequence
  primer
cgaactaacagcaactggcac

SEQ ID NO: 114176 - DNA, 38 bp, Artificial Sequence
  primer
gtaaaacgacggccagtttgagagccactttagctggg

SEQ ID NO: 114177 - DNA, 21 bp, Artificial Sequence
  primer
ggagtgaaggagggtgttcag

SEQ ID NO: 114178 - DNA, 21 bp, Artificial Sequence
  primer
tgctggtttgaatttcacctg

SEQ ID NO: 114179 - DNA, 21 bp, Artificial Sequence
  primer
atagcaaggctaccggaaatg

SEQ ID NO: 114180 - DNA, 36 bp, Artificial Sequence
  primer
gtaaaacgacggccagttgagctcattccatgccag

SEQ ID NO: 114181 - DNA, 21 bp, Artificial Sequence
  primer
ccttggagacacatgcaacaa

SEQ ID NO: 114182 - DNA, 38 bp, Artificial Sequence
  primer
gtaaaacgacggccagtatcactttgcaggcacatacc

SEQ ID NO: 114183 - DNA, 38 bp, Artificial Sequence
  primer
gtaaaacgacggccagtggccaaatattcatgtccctg

SEQ ID NO: 114184 - DNA, 21 bp, Artificial Sequence
  primer
ctgatactgcgtgttggcttc

SEQ ID NO: 114185 - DNA, 22 bp, Artificial Sequence
  primer
gcgttccatataaagaaatggc

SEQ ID NO: 114186 - DNA, 35 bp, Artificial Sequence
  primer
gtaaaacgacggccagtgccagagcgctcctaacc

SEQ ID NO: 114187 - DNA, 21 bp, Artificial Sequence
  primer
cacagttgggagttgtgaacg

SEQ ID NO: 114188 - DNA, 38 bp, Artificial Sequence
  primer
gtaaaacgacggccagtcattaagcactccacacggtc

SEQ ID NO: 114189 - DNA, 26 bp, Artificial Sequence
  primer
cctatcttgtaagttacccaaattcc

SEQ ID NO: 114190 - DNA, 38 bp, Artificial Sequence
  primer
gtaaaacgacggccagtcatcgtacgaaacattacggc

SEQ ID NO: 114191 - DNA, 38 bp, Artificial Sequence
  primer
gtaaaacgacggccagtattctacagccatcctccagc

SEQ ID NO: 114192 - DNA, 21 bp, Artificial Sequence
  primer
ctctctctctcagcctcccac

SEQ ID NO: 114193 - DNA, 21 bp, Artificial Sequence
  primer
ctaactaccgccatcccagtg

SEQ ID NO: 114194 - DNA, 38 bp, Artificial Sequence
  primer
gtaaaacgacggccagtgagtgtaaggcagaatcagcg

SEQ ID NO: 114195 - DNA, 44 bp, Artificial Sequence
  primer
gtaaaacgacggccagttctagtgttcatccagaaatcattagg

SEQ ID NO: 114196 - DNA, 21 bp, Artificial Sequence
  primer
gatgaattacctttgggaggg

SEQ ID NO: 114197 - DNA, 18 bp, Artificial Sequence
  primer
tcctccaaagtcgcatgg

SEQ ID NO: 114198 - DNA, 23 bp, Artificial Sequence
  primer
ccaatgttattgcagttcaaacc

SEQ ID NO: 114199 - DNA, 38 bp, Artificial Sequence
  primer
gtaaaacgacggccagtgcccttaaagatgctggattc

SEQ ID NO: 114200 - DNA, 19 bp, Artificial Sequence
  primer
agcgtgtcatccctccaac

SEQ ID NO: 114201 - DNA, 38 bp, Artificial Sequence
  primer
gtaaaacgacggccagtttcctggtttcctctattccc

SEQ ID NO: 114202 - DNA, 18 bp, Artificial Sequence
  primer
ccagctcagctcgtccag

SEQ ID NO: 114203 - DNA, 36 bp, Artificial Sequence
  primer
gtaaaacgacggccagtctcgtacagctgcaccgtc

SEQ ID NO: 114204 - DNA, 38 bp, Artificial Sequence
  primer
gtaaaacgacggccagtggcctgtatcccgtactcctc

SEQ ID NO: 114205 - DNA, 36 bp, Artificial Sequence
  primer
gtaaaacgacggccagtctatccgctaggacctgcc

SEQ ID NO: 114206 - DNA, 38 bp, Artificial Sequence
  primer
gtaaaacgacggccagtgactccacaaaggctacggtc

SEQ ID NO: 114207 - DNA, 22 bp, Artificial Sequence
  primer
ccatatctaacccgttcttccc

SEQ ID NO: 114208 - DNA, 21 bp, Artificial Sequence
  primer
ctccttcatctgctggctttc

SEQ ID NO: 114209 - DNA, 21 bp, Artificial Sequence
  primer
ctgctacggtttctgtcatgg

SEQ ID NO: 114210 - DNA, 21 bp, Artificial Sequence
  primer
cggaaacatcaacatcctcag

SEQ ID NO: 114211 - DNA, 21 bp, Artificial Sequence
  primer
cctgcctctgtcacttcttcc

SEQ ID NO: 114212 - DNA, 38 bp, Artificial Sequence
  primer
gtaaaacgacggccagtcaagggcttcacaaccttctc

SEQ ID NO: 114213 - DNA, 21 bp, Artificial Sequence
  primer
atctttgctcagctcctccag

SEQ ID NO: 114214 - DNA, 36 bp, Artificial Sequence
  primer
gtaaaacgacggccagtcaccagcaacctcgctctc

SEQ ID NO: 114215 - DNA, 21 bp, Artificial Sequence
  primer
taggtcacctcccgcacttac

SEQ ID NO: 114216 - DNA, 37 bp, Artificial Sequence
  primer
gtaaaacgacggccagtgcagggcctaggaagatgac

SEQ ID NO: 114217 - DNA, 38 bp, Artificial Sequence
  primer
gtaaaacgacggccagtatagactccctcggcctctta

SEQ ID NO: 114218 - DNA, 21 bp, Artificial Sequence
  primer
ctccttcatctgctggctttc

SEQ ID NO: 114219 - DNA, 21 bp, Artificial Sequence
  primer
ctgctacggtttctgtcatgg

SEQ ID NO: 114220 - DNA, 38 bp, Artificial Sequence
  primer
gtaaaacgacggccagtcggaaacatcaacatcctcag

SEQ ID NO: 114221 - DNA, 38 bp, Artificial Sequence
  primer
gtaaaacgacggccagtcctgcctctgtcacttcttcc

SEQ ID NO: 114222 - DNA, 21 bp, Artificial Sequence
  primer
caagggcttcacaaccttctc

SEQ ID NO: 114223 - DNA, 38 bp, Artificial Sequence
  primer
gtaaaacgacggccagtatctttgctcagctcctccag

SEQ ID NO: 114224 - DNA, 36 bp, Artificial Sequence; identical to SEQ ID NO: 114214
  primer

SEQ ID NO: 114225 - DNA, 21 bp, Artificial Sequence
  primer
taggtcacctcccgcacttac

SEQ ID NO: 114226 - DNA, 38 bp, Artificial Sequence
  primer
gtaaaacgacggccagtgcctaactggagttgcctgac

SEQ ID NO: 114227 - DNA, 39 bp, Artificial Sequence
  primer
gtaaaacgacggccagttggtaaactatctgctgggtgg

SEQ ID NO: 114228 - DNA, 38 bp, Artificial Sequence
  primer
gtaaaacgacggccagtaggatctgctaacacccgatg

SEQ ID NO: 114229 - DNA, 21 bp, Artificial Sequence
  primer
cggatcgcctctacgttactc

SEQ ID NO: 114230 - DNA, 38 bp, Artificial Sequence
  primer
gtaaaacgacggccagtgttaaggcctttggatgttgg

SEQ ID NO: 114231 - DNA, 23 bp, Artificial Sequence
  primer
tctatgtgaatggcaactgaaca

SEQ ID NO: 114232 - DNA, 25 bp, Artificial Sequence
  primer
tcctgaagactcttgattcattgtc

SEQ ID NO: 114233 - DNA, 40 bp, Artificial Sequence
  primer
gtaaaacgacggccagttgatacacatcaattgcttccag

SEQ ID NO: 114234 - DNA, 38 bp, Artificial Sequence
  primer
gtaaaacgacggccagtgccagcaatctaggctcagtg

SEQ ID NO: 114235 - DNA, 21 bp, Artificial Sequence
  primer
atgcctgcactgttcattctg

SEQ ID NO: 114236 - DNA, 21 bp, Artificial Sequence
  primer
agtcacccttgctgtctctcc

SEQ ID NO: 114237 - DNA, 21 bp, Artificial Sequence
  primer
tcttcctcagaatggctttcc

SEQ ID NO: 114238 - DNA, 21 bp, Artificial Sequence
  primer
gatgctaatagccgtcttggc

SEQ ID NO: 114239 - DNA, 38 bp, Artificial Sequence
  primer
gtaaaacgacggccagtctctttggctgtgttctggtg

SEQ ID NO: 114240 - DNA, 22 bp, Artificial Sequence
  primer
ggtggcataggacagagaaatg

SEQ ID NO: 114241 - DNA, 38 bp, Artificial Sequence
  primer
gtaaaacgacggccagtggttctaaggctcggtcattc

SEQ ID NO: 114242 - DNA, 21 bp, Artificial Sequence
  primer
attcaccaacacgtccctctc

SEQ ID NO: 114243 - DNA, 38 bp, Artificial Sequence
  primer
gtaaaacgacggccagtgactttcccacagacgtttcc

SEQ ID NO: 114244 - DNA, 20 bp, Artificial Sequence
  primer
tctctgggctctgaccttcc

SEQ ID NO: 114245 - DNA, 21 bp, Artificial Sequence
  primer
atgcacacttaagcctgggtc

SEQ ID NO: 114246 - DNA, 20 bp, Artificial Sequence
  primer
ctcctgctcagagggagagg

SEQ ID NO: 114247 - DNA, 38 bp, Artificial Sequence
  primer
gtaaaacgacggccagtggaatgagtgattcaggaccc

SEQ ID NO: 114248 - DNA, 38 bp, Artificial Sequence
  primer
gtaaaacgacggccagtaggttccaagactgatcctgc

SEQ ID NO: 114249 - DNA, 21 bp, Artificial Sequence
  primer
cgtggtttctgtctgcttctg

SEQ ID NO: 114250 - DNA, 21 bp, Artificial Sequence
  primer
gggaggtaaggacggtgagtc

SEQ ID NO: 114251 - DNA, 19 bp, Artificial Sequence
  primer
cttccctcctccaggtgtc

SEQ ID NO: 114252 - DNA, 21 bp, Artificial Sequence
  primer
gtgagccctatatctggacgg

SEQ ID NO: 114253 - DNA, 37 bp, Artificial Sequence
  primer
gtaaaacgacggccagtctagcggcctgtgttgattg

SEQ ID NO: 114254 - DNA, 19 bp, Artificial Sequence
  primer
attcccggctacaaggacc

SEQ ID NO: 114255 - DNA, 21 bp, Artificial Sequence
  primer
atcaggttgcacttcttgcac

SEQ ID NO: 114256 - DNA, 35 bp, Artificial Sequence
  primer
gtaaaacgacggccagtggtgtgcgcctgtagtcc

SEQ ID NO: 114257 - DNA, 20 bp, Artificial Sequence
  primer
agcccttcacagggagaatc

SEQ ID NO: 114258 - DNA, 19 bp, Artificial Sequence
  primer
acaagtgcgtgtgtgcctc

SEQ ID NO: 114259 - DNA, 25 bp, Artificial Sequence
  primer
tccaacaattactaacagctaagcc

SEQ ID NO: 114260 - DNA, 40 bp, Artificial Sequence
  primer
gtaaaacgacggccagtcaaatgtgttacagcctctggac

SEQ ID NO: 114261 - DNA, 38 bp, Artificial Sequence
  primer
gtaaaacgacggccagttgtttgcttgcttgcttcaac

SEQ ID NO: 114262 - DNA, 36 bp, Artificial Sequence
  primer
gtaaaacgacggccagtccttcaggcaggacaccac

SEQ ID NO: 114263 - DNA, 35 bp, Artificial Sequence
  primer
gtaaaacgacggccagtcacctccactgtggcctg

SEQ ID NO: 114264 - DNA, 37 bp, Artificial Sequence
  primer
gtaaaacgacggccagtcactttcaaggcctctctgc

SEQ ID NO: 114265 - DNA, 21 bp, Artificial Sequence
  primer
atcttctccgtacgggttcag

SEQ ID NO: 114266 - DNA, 38 bp, Artificial Sequence
  primer
gtaaaacgacggccagttgcatggttaaatcaaggcag

SEQ ID NO: 114267 - DNA, 21 bp, Artificial Sequence
  primer
actgaggtggtggcatttagc

SEQ ID NO: 114268 - DNA, 38 bp, Artificial Sequence
  primer
gtaaaacgacggccagtaggcctctttgacaaatggtg

SEQ ID NO: 114269 - DNA, 21 bp, Artificial Sequence
  primer
gagagacacgagtgatggcag

SEQ ID NO: 114270 - DNA, 20 bp, Artificial Sequence
  primer
gatgaggatgcacttctcgc

SEQ ID NO: 114271 - DNA, 21 bp, Artificial Sequence
  primer
acctcagacgctcttacctgg

SEQ ID NO: 114272 - DNA, 36 bp, Artificial Sequence
  primer
gtaaaacgacggccagtgtcctcccaagtggagctg

SEQ ID NO: 114273 - DNA, 21 bp, Artificial Sequence
  primer
caagctgaagggcagagaaac

SEQ ID NO: 114274 - DNA, 21 bp, Artificial Sequence
  primer
ctcgccaaagtattcctcagc

SEQ ID NO: 114275 - DNA, 38 bp, Artificial Sequence
  primer
gtaaaacgacggccagtcacaagatgtggcctctcctc

SEQ ID NO: 114276 - DNA, 38 bp, Artificial Sequence
  primer
gtaaaacgacggccagtaccacaccatggttacgacag

SEQ ID NO: 114277 - DNA, 37 bp, Artificial Sequence
  primer
gtaaaacgacggccagtctgtctcaaggcacccagtc

SEQ ID NO: 114278 - DNA, 38 bp, Artificial Sequence
  primer
gtaaaacgacggccagtacacggtggcttgtttcagag

SEQ ID NO: 114279 - DNA, 21 bp, Artificial Sequence
  primer
gaagctctctgaaaggctgtg

SEQ ID NO: 114280 - DNA, 38 bp, Artificial Sequence
  primer
gtaaaacgacggccagtacggattgtcctgatttggtc

SEQ ID NO: 114281 - DNA, 22 bp, Artificial Sequence
  primer
cacgtgcatgtattgtatgctg

SEQ ID NO: 114282 - DNA, 36 bp, Artificial Sequence
  primer
gtaaaacgacggccagtggctgctcgaagaagcaag

SEQ ID NO: 114283 - DNA, 20 bp, Artificial Sequence
  primer
caaagcggaaggtccgttac

SEQ ID NO: 114284 - DNA, 21 bp, Artificial Sequence
  primer
actgaggatccatcaaggcag

SEQ ID NO: 114285 - DNA, 38 bp, Artificial Sequence
  primer
gtaaaacgacggccagtttccatgtcccttctctccac

SEQ ID NO: 114286 - DNA, 39 bp, Artificial Sequence
  primer
gtaaaacgacggccagtgccatctatgctatcaacctcc

SEQ ID NO: 114287 - DNA, 21 bp, Artificial Sequence
  primer
gggagttgcaagtcaaaggtc

SEQ ID NO: 114288 - DNA, 21 bp, Artificial Sequence
  primer
gtcgtacaccaattcagcagc

SEQ ID NO: 114289 - DNA, 38 bp, Artificial Sequence
  primer
gtaaaacgacggccagtgctagaacccaggtgttgagg

SEQ ID NO: 114290 - DNA, 22 bp, Artificial Sequence
  primer
ttcctcttccctctccaatatg

SEQ ID NO: 114291 - DNA, 20 bp, Artificial Sequence
  primer
ggacacagcacaggcttagg

SEQ ID NO: 114292 - DNA, 39 bp, Artificial Sequence
  primer
gtaaaacgacggccagttgcagcctaaactcataggcac

SEQ ID NO: 114293 - DNA, 38 bp, Artificial Sequence
  primer
gtaaaacgacggccagtaaatgccaactgaaagccttg

SEQ ID NO: 114294 - DNA, 38 bp, Artificial Sequence
  primer
gtaaaacgacggccagttacttgggaggctgaggtttc

SEQ ID NO: 114295 - DNA, 21 bp, Artificial Sequence
  primer
tcaatcccagtgatgaaggtc

SEQ ID NO: 114296 - DNA, 24 bp, Artificial Sequence
  primer
gggtggtaactaaagcagtaaagc

SEQ ID NO: 114297 - DNA, 22 bp, Artificial Sequence
  primer
caacatggacctggaggataaa

SEQ ID NO: 114298 - DNA, 22 bp, Artificial Sequence
  primer
aaggccaatcatgcttaatagc

SEQ ID NO: 114299 - DNA, 21 bp, Artificial Sequence
  primer
tgaatgatctaaatcgctccc

SEQ ID NO: 114300 - DNA, 39 bp, Artificial Sequence
  primer
gtaaaacgacggccagttttcagacactaggcatccagg

SEQ ID NO: 114301 - DNA, 23 bp, Artificial Sequence
  primer
gggcaaagaacttctaacctctc

SEQ ID NO: 114302 - DNA, 38 bp, Artificial Sequence
  primer
gtaaaacgacggccagtgtccttcagttcaccgacttg

SEQ ID NO: 114303 - DNA, 22 bp, Artificial Sequence
  primer
tctaccattcatttggcctcag

SEQ ID NO: 114304 - DNA, 38 bp, Artificial Sequence
  primer
gtaaaacgacggccagtcactccagtgaaggcagagtg

SEQ ID NO: 114305 - DNA, 39 bp, Artificial Sequence
  primer
gtaaaacgacggccagtttcctcttgtttaaggtcggtg

SEQ ID NO: 114306 - DNA, 38 bp, Artificial Sequence
  primer
gtaaaacgacggccagtctttgtgaggtgtgaggttgg

SEQ ID NO: 114307 - DNA, 41 bp, Artificial Sequence
  primer
gtaaaacgacggccagtttggatcaagaaagactgaaacaa

SEQ ID NO: 114308 - DNA, 38 bp, Artificial Sequence
  primer
gtaaaacgacggccagttgtgtggcttaaggactgtgg

SEQ ID NO: 114309 - DNA, 38 bp, Artificial Sequence
  primer
gtaaaacgacggccagttagaaatagagctcacggccc

SEQ ID NO: 114310 - DNA, 36 bp, Artificial Sequence
  primer
gtaaaacgacggccagtctgtcgccctacaacgtcc

SEQ ID NO: 114311 - DNA, 21 bp, Artificial Sequence
  primer
tgtcattagctgctgtcaccc

SEQ ID NO: 114312 - DNA, 21 bp, Artificial Sequence
  primer
tggcagcatagacagagaagc

SEQ ID NO: 114313 - DNA, 20 bp, Artificial Sequence
  primer
gtgaaggaccacacggtgac

SEQ ID NO: 114314 - DNA, 37 bp, Artificial Sequence
  primer
gtaaaacgacggccagtcgggtagagcacgtcttcag

SEQ ID NO: 114315 - DNA, 36 bp, Artificial Sequence
  primer
gtaaaacgacggccagtgagactgttggagcgggac

SEQ ID NO: 114316 - DNA, 37 bp, Artificial Sequence
  primer
gtaaaacgacggccagtaggcagtgatgatgcagtcc

SEQ ID NO: 114317 - DNA, 38 bp, Artificial Sequence
  primer
gtaaaacgacggccagtacagcaacaaagccctctctc

SEQ ID NO: 114318 - DNA, 21 bp, Artificial Sequence
  primer
tagctagcttcctgtcctggc

SEQ ID NO: 114319 - DNA, 21 bp, Artificial Sequence
  primer
gccacaagggctattacatcg

SEQ ID NO: 114320 - DNA, 21 bp, Artificial Sequence
  primer
ccttagttctcaagggccagg

SEQ ID NO: 114321 - DNA, 40 bp, Artificial Sequence
  primer
gtaaaacgacggccagttctttgaaacaaagccaagtctc

SEQ ID NO: 114322 - DNA, 42 bp, Artificial Sequence
  primer
gtaaaacgacggccagtgtgccaaactttaggttactgactc

SEQ ID NO: 114323 - DNA, 40 bp, Artificial Sequence
  primer
gtaaaacgacggccagtcacacccagcagaagtgaaatac

SEQ ID NO: 114324 - DNA, 41 bp, Artificial Sequence
  primer
gtaaaacgacggccagttttgtagaacacgggaaatagaga

SEQ ID NO: 114325 - DNA, 21 bp, Artificial Sequence
  primer
ttagacgggcatagtggtgtg

SEQ ID NO: 114326 - DNA, 41 bp, Artificial Sequence
  primer
gtaaaacgacggccagtggctcagaagtcctgtaactatgg

SEQ ID NO: 114327 - DNA, 23 bp, Artificial Sequence
  primer
ttcagccaagtcaaatgtaatca

SEQ ID NO: 114328 - DNA, 39 bp, Artificial Sequence
  primer
gtaaaacgacggccagtggctaagacagtcacctccaat

SEQ ID NO: 114329 - DNA, 39 bp, Artificial Sequence
  primer
gtaaaacgacggccagtccatgtttggatcatgtcattg

SEQ ID NO: 114330 - DNA, 22 bp, Artificial Sequence
  primer
tggaattctggaaacaaaggac

SEQ ID NO: 114331 - DNA, 22 bp, Artificial Sequence
  primer
gccactgattcagagaaccatc

SEQ ID NO: 114332 - DNA, 38 bp, Artificial Sequence
  primer
gtaaaacgacggccagtctgggtataagagtgggcagc

SEQ ID NO: 114333 - DNA, 38 bp, Artificial Sequence
  primer
gtaaaacgacggccagtggctacaaagcatgcactagg

SEQ ID NO: 114334 - DNA, 25 bp, Artificial Sequence
  primer
ctttcaaagagtgaaagaaatggtt

SEQ ID NO: 114335 - DNA, 27 bp, Artificial Sequence
  primer
tatttggctgtgaatatagtaatgagg

SEQ ID NO: 114336 - DNA, 21 bp, Artificial Sequence
  primer
atccaaatggatgggtaggac

SEQ ID NO: 114337 - DNA, 24 bp, Artificial Sequence
  primer
gaatggctttaagaaatatgtccc

SEQ ID NO: 114338 - DNA, 24 bp, Artificial Sequence
  primer
tttccatttctagttctgtgtgga

SEQ ID NO: 114339 - DNA, 21 bp, Artificial Sequence
  primer
gaattgtctgctcaaggaccc

SEQ ID NO: 114340 - DNA, 38 bp, Artificial Sequence
  primer
gtaaaacgacggccagtaaatgccagggtttccttacc

SEQ ID NO: 114341 - DNA, 38 bp, Artificial Sequence
  primer
gtaaaacgacggccagtactggtcatggatcgagtcag

SEQ ID NO: 114342 - DNA, 38 bp, Artificial Sequence
  primer
gtaaaacgacggccagtttcagcttcattcagagccac

SEQ ID NO: 114343 - DNA, 38 bp, Artificial Sequence
  primer
gtaaaacgacggccagtagtggccagaaagaacctgag

SEQ ID NO: 114344 - DNA, 38 bp, Artificial Sequence
  primer
gtaaaacgacggccagtttaccttggcttctgtctcgg

SEQ ID NO: 114345 - DNA, 37 bp, Artificial Sequence
  primer
gtaaaacgacggccagtcaagcatcatcccacctcag

SEQ ID NO: 114346 - DNA, 44 bp, Artificial Sequence
  primer
gtaaaacgacggccagttctccagtatgtttcttcattaactcc

SEQ ID NO: 114347 - DNA, 39 bp, Artificial Sequence
  primer
gtaaaacgacggccagtggcagagaagatatgaaatgcc

SEQ ID NO: 114348 - DNA, 22 bp, Artificial Sequence
  primer
cctcatcaggtttcttccactc

SEQ ID NO: 114349 - DNA, 38 bp, Artificial Sequence
  primer
gtaaaacgacggccagttttggccttgtgttatttcca

SEQ ID NO: 114350 - DNA, 40 bp, Artificial Sequence
  primer
gtaaaacgacggccagtagaccatgaattcaatttgtttg

SEQ ID NO: 114351 - DNA, 22 bp, Artificial Sequence
  primer
gactgtgaccaatcaacagcag

SEQ ID NO: 114352 - DNA, 21 bp, Artificial Sequence
  primer
tttggtgaggcaaatcttcag

SEQ ID NO: 114353 - DNA, 41 bp, Artificial Sequence
  primer
gtaaaacgacggccagtttacatacctgctgagattcttgc

SEQ ID NO: 114354 - DNA, 37 bp, Artificial Sequence
  primer
gtaaaacgacggccagtagctttccctaaagcaaccg

SEQ ID NO: 114355 - DNA, 24 bp, Artificial Sequence
  primer
ggaatcaacataaacttggcaatg

SEQ ID NO: 114356 - DNA, 38 bp, Artificial Sequence
  primer
gtaaaacgacggccagtagggtttgagattcatctgcc

SEQ ID NO: 114357 - DNA, 43 bp, Artificial Sequence
  primer
gtaaaacgacggccagtaactgtaattcagaatgagtggtgaa

SEQ ID NO: 114358 - DNA, 30 bp, Artificial Sequence
  primer
tggtctctaaccagaactttctataactaa

SEQ ID NO: 114359 - DNA, 26 bp, Artificial Sequence
  primer
tggaatgtagcctgatactaatgaaa

SEQ ID NO: 114360 - DNA, 26 bp, Artificial Sequence
  primer
aacaatttcaactaaagaaatctggg

SEQ ID NO: 114361 - DNA, 23 bp, Artificial Sequence
  primer
cggatacatttacagatggttgg

SEQ ID NO: 114362 - DNA, 35 bp, Artificial Sequence
  primer
gtaaaacgacggccagtcactccagcccggatgac

SEQ ID NO: 114363 - DNA, 42 bp, Artificial Sequence
  primer
gtaaaacgacggccagtttgcctatgtttatgatacgtgttt

SEQ ID NO: 114364 - DNA, 40 bp, Artificial Sequence
  primer
gtaaaacgacggccagtccagattgcaatttaaggaactg

SEQ ID NO: 114365 - DNA, 22 bp, Artificial Sequence
  primer
ttatttaaagctcttgccaccc

SEQ ID NO: 114366 - DNA, 46 bp, Artificial Sequence
  primer
gtaaaacgacggccagtttaaatcatcctttatccattaacctaga

SEQ ID NO: 114367 - DNA, 38 bp, Artificial Sequence
  primer
gtaaaacgacggccagtaaaggttcccacacatttctt

SEQ ID NO: 114368 - DNA, 22 bp, Artificial Sequence
  primer
actactacccacggagctgttc

SEQ ID NO: 114369 - DNA, 39 bp, Artificial Sequence
  primer
gtaaaacgacggccagtgcaaagtgactgagaacacagg

SEQ ID NO: 114370 - DNA, 20 bp, Artificial Sequence
  primer
gggcaggagatgacactttc

SEQ ID NO: 114371 - DNA, 38 bp, Artificial Sequence
  primer
gtaaaacgacggccagtctttcaaatcctgccatcctg

SEQ ID NO: 114372 - DNA, 42 bp, Artificial Sequence
  primer
gtaaaacgacggccagtcaattagcactgctgactacaaagg

SEQ ID NO: 114373 - DNA, 37 bp, Artificial Sequence
  primer
gtaaaacgacggccagttcagtgcatcaagggcaaag

SEQ ID NO: 114374 - DNA, 20 bp, Artificial Sequence
  primer
accaacatctcacagcctcc

SEQ ID NO: 114375 - DNA, 44 bp, Artificial Sequence
  primer
gtaaaacgacggccagtccaagcaatacataagaaattatacgc

SEQ ID NO: 114376 - DNA, 44 bp, Artificial Sequence
  primer
gtaaaacgacggccagtaaggatcctaacataaagcactagacc

SEQ ID NO: 114377 - DNA, 38 bp, Artificial Sequence
  primer
gtaaaacgacggccagttaagcattgcacaaagcactg

SEQ ID NO: 114378 - DNA, 23 bp, Artificial Sequence
  primer
tctaggcatctaaatgcaatggt

SEQ ID NO: 114379 - DNA, 38 bp, Artificial Sequence
  primer
gtaaaacgacggccagttattcttcaggccagctttgc

SEQ ID NO: 114380 - DNA, 39 bp, Artificial Sequence
  primer
gtaaaacgacggccagtgcctatgctattaattgccacc

SEQ ID NO: 114381 - DNA, 38 bp, Artificial Sequence
  primer
gtaaaacgacggccagttgtgtgccatctgcatgttag

SEQ ID NO: 114382 - DNA, 38 bp, Artificial Sequence
  primer
gtaaaacgacggccagtatcacataggcccaattcaaa

SEQ ID NO: 114383 - DNA, 37 bp, Artificial Sequence
  primer
gtaaaacgacggccagtgaagagcgggaaggaagaat

SEQ ID NO: 114384 - DNA, 43 bp, Artificial Sequence
  primer
gtaaaacgacggccagtcatgctaactctacaaagcatttatt

SEQ ID NO: 114385 - DNA, 22 bp, Artificial Sequence
  primer
ctgcccactgatttaaagaacc

SEQ ID NO: 114386 - DNA, 21 bp, Artificial Sequence
  primer
tattgggtctacacgccacag

SEQ ID NO: 114387 - DNA, 37 bp, Artificial Sequence
  primer
gtaaaacgacggccagtgggaatgagagttggaagcc

SEQ ID NO: 114388 - DNA, 25 bp, Artificial Sequence
  primer
tccctaaacagcaactaacaaacac

SEQ ID NO: 114389 - DNA, 21 bp, Artificial Sequence
  primer
ctctgcatgcctttgcatact

SEQ ID NO: 114390 - DNA, 38 bp, Artificial Sequence
  primer
gtaaaacgacggccagtcccacagccctcttcatctac

SEQ ID NO: 114391 - DNA, 38 bp, Artificial Sequence
  primer
gtaaaacgacggccagttctaatgtgcccttaggctgg

SEQ ID NO: 114392 - DNA, 27 bp, Artificial Sequence
  primer
tgtcaacatagaacatatttcagaaga

SEQ ID NO: 114393 - DNA, 20 bp, Artificial Sequence
  primer
ttataagccactgcaaggcg

SEQ ID NO: 114394 - DNA, 21 bp, Artificial Sequence
  primer
cagtcacaattcctgaaagcc

SEQ ID NO: 114395 - DNA, 21 bp, Artificial Sequence
  primer
acccaagagagagaaacaggc

SEQ ID NO: 114396 - DNA, 21 bp, Artificial Sequence
  primer
agttccttctccagcatcagg

SEQ ID NO: 114397 - DNA, 38 bp, Artificial Sequence
  primer
gtaaaacgacggccagtcttggccaaagtaagctggtc

SEQ ID NO: 114398 - DNA, 21 bp, Artificial Sequence
  primer
agccactgtatcagccaaagc

SEQ ID NO: 114399 - DNA, 43 bp, Artificial Sequence
  primer
gtaaaacgacggccagttgtttacacacaaacatgatacaccc

SEQ ID NO: 114400 - DNA, 24 bp, Artificial Sequence
  primer
gacaaacaaatttcccactacagg

SEQ ID NO: 114401 - DNA, 21 bp, Artificial Sequence
  primer
tcagctaaaggaaccaggtcg

SEQ ID NO: 114402 - DNA, 25 bp, Artificial Sequence
  primer
tctgtgtcctaacaaacatatgacc

SEQ ID NO: 114403 - DNA, 21 bp, Artificial Sequence
  primer
agctacagaatgtggcaaaca

SEQ ID NO: 114404 - DNA, 38 bp, Artificial Sequence
  primer
gtaaaacgacggccagtcatttgaccattcaatgccag

SEQ ID NO: 114405 - DNA, 21 bp, Artificial Sequence
  primer
aaaccaacagcatcgtcttcc

SEQ ID NO: 114406 - DNA, 21 bp, Artificial Sequence
  primer
tcctgatccagcagatcactc

SEQ ID NO: 114407 - DNA, 38 bp, Artificial Sequence
  primer
gtaaaacgacggccagtccttactgaagccaaaccacc

SEQ ID NO: 114408 - DNA, 40 bp, Artificial Sequence
  primer
gtaaaacgacggccagtgcctcctataaagagaggagctg

SEQ ID NO: 114409 - DNA, 41 bp, Artificial Sequence
  primer
gtaaaacgacggccagtatgagtgagaaaggtagcactttg

SEQ ID NO: 114410 - DNA, 25 bp, Artificial Sequence
  primer
tttatttctgattctctcgcatgta

SEQ ID NO: 114411 - DNA, 22 bp, Artificial Sequence
  primer
caagcaggaaactggtcagtag

SEQ ID NO: 114412 - DNA, 24 bp, Artificial Sequence
  primer
ttcaaagtgaaatttcttgaaaca

SEQ ID NO: 114413 - DNA, 44 bp, Artificial Sequence
  primer
gtaaaacgacggccagtttaaacgtctaaactatggtgattcaa

SEQ ID NO: 114414 - DNA, 20 bp, Artificial Sequence
  primer
agactgaggtgggaggatgg

SEQ ID NO: 114415 - DNA, 40 bp, Artificial Sequence
  primer
gtaaaacgacggccagttggcatatttagccaaactgtct

SEQ ID NO: 114416 - DNA, 42 bp, Artificial Sequence
  primer
gtaaaacgacggccagtaaatcaagcactgatttccttagaa

SEQ ID NO: 114417 - DNA, 39 bp, Artificial Sequence
  primer
gtaaaacgacggccagttttgcctataaagcaaaggcag

SEQ ID NO: 114418 - DNA, 21 bp, Artificial Sequence
  primer
cccaaatgaaggagatacacg

SEQ ID NO: 114419 - DNA, 40 bp, Artificial Sequence
  primer
gtaaaacgacggccagttccctgaaatttaggatcattcc

SEQ ID NO: 114420 - DNA, 20 bp, Artificial Sequence
  primer
acattcgtacactgccgtcc

SEQ ID NO: 114421 - DNA, 26 bp, Artificial Sequence
  primer
tctactcagtttaaatccagggtcac

SEQ ID NO: 114422 - DNA, 21 bp, Artificial Sequence
  primer
ctagggtaaggatgggtgctg

SEQ ID NO: 114423 - DNA, 25 bp, Artificial Sequence
  primer
tcagatgcctgttagtcctagagaa

SEQ ID NO: 114424 - DNA, 39 bp, Artificial Sequence
  primer
gtaaaacgacggccagttttaactcagcaaggaagccag

SEQ ID NO: 114425 - DNA, 21 bp, Artificial Sequence
  primer
tatctccatgcagtagcccaa

SEQ ID NO: 114426 - DNA, 38 bp, Artificial Sequence
  primer
gtaaaacgacggccagtgtacatgcgcattcattccac

SEQ ID NO: 114427 - DNA, 21 bp, Artificial Sequence
  primer
agaaggatgaaaggatgggtg

SEQ ID NO: 114428 - DNA, 21 bp, Artificial Sequence
  primer
gggtaattgtgaagcaccctg

SEQ ID NO: 114429 - DNA, 21 bp, Artificial Sequence
  primer
gtgatctgcagttcctcatcc

SEQ ID NO: 114430 - DNA, 21 bp, Artificial Sequence
  primer
gccctgtttgacaagagtgtg

SEQ ID NO: 114431 - DNA, 37 bp, Artificial Sequence
  primer
gtaaaacgacggccagtggagcccaggagtctgtgac

SEQ ID NO: 114432 - DNA, 37 bp, Artificial Sequence
  primer
gtaaaacgacggccagtgagttggcctcagtcacagg

SEQ ID NO: 114433 - DNA, 38 bp, Artificial Sequence
  primer
gtaaaacgacggccagtccctggagtagcaccaacttc

SEQ ID NO: 114434 - DNA, 21 bp, Artificial Sequence
  primer
agtgggacaagtgctggagac

SEQ ID NO: 114435 - DNA, 20 bp, Artificial Sequence
  primer
taggaagaggctgaggccag

SEQ ID NO: 114436 - DNA, 20 bp, Artificial Sequence
  primer
agctcggctctccttactgc

SEQ ID NO: 114437 - DNA, 37 bp, Artificial Sequence
  primer
gtaaaacgacggccagtagttgaactgtggcagcacc

SEQ ID NO: 114438 - DNA, 21 bp, Artificial Sequence
  primer
ttctgaggacagcaagcacac

SEQ ID NO: 114439 - DNA, 21 bp, Artificial Sequence
  primer
atgtatgtgagggtccgtgtg

SEQ ID NO: 114440 - DNA, 21 bp, Artificial Sequence
  primer
ccaactaccttaccctcagcc

SEQ ID NO: 114441 - DNA, 20 bp, Artificial Sequence
  primer
aaatgaattccttcggccac

SEQ ID NO: 114442 - DNA, 21 bp, Artificial Sequence
  primer
cctgaatgcaagaagtgaggc

SEQ ID NO: 114443 - DNA, 21 bp, Artificial Sequence
  primer
ggttgggctatctccactctg

SEQ ID NO: 114444 - DNA, 38 bp, Artificial Sequence
  primer
gtaaaacgacggccagtatggtttgaactcctcgatgc

SEQ ID NO: 114445 - DNA, 19 bp, Artificial Sequence
  primer
atcctcccaagtggctgtg

SEQ ID NO: 114446 - DNA, 21 bp, Artificial Sequence
  primer
catcagtgacacctgtgggtc

SEQ ID NO: 114447 - DNA, 21 bp, Artificial Sequence
  primer
taggaggctaccagcaatgtg

SEQ ID NO: 114448 - DNA, 36 bp, Artificial Sequence
  primer
gtaaaacgacggccagtccagtcctgctgacatccc

SEQ ID NO: 114449 - DNA, 20 bp, Artificial Sequence
  primer
aaagggctcatcacaaaggg

SEQ ID NO: 114450 - DNA, 21 bp, Artificial Sequence
  primer
ggagtgagtcccactttctgg

SEQ ID NO: 114451 - DNA, 21 bp, Artificial Sequence
  primer
tggctggttgtgagacacttc

SEQ ID NO: 114452 - DNA, 21 bp, Artificial Sequence
  primer
gtcccagaacctcaaggacag

SEQ ID NO: 114453 - DNA, 38 bp, Artificial Sequence
  primer
gtaaaacgacggccagtccctgtactgctctgatggac

SEQ ID NO: 114454 - DNA, 21 bp, Artificial Sequence
  primer
caagccgtgatgcctattacc

SEQ ID NO: 114455 - DNA, 21 bp, Artificial Sequence
  primer
gcacgtggctagagaaaggac

SEQ ID NO: 114456 - DNA, 21 bp, Artificial Sequence
  primer
tggagtccaagcaactgtgtc

SEQ ID NO: 114457 - DNA, 38 bp, Artificial Sequence
  primer
gtaaaacgacggccagtggtaatgcctgtaaagcaccg

SEQ ID NO: 114458 - DNA, 20 bp, Artificial Sequence
  primer
aacttgggcacgttcacatc

SEQ ID NO: 114459 - DNA, 21 bp, Artificial Sequence
  primer
ggttggactgtcctgtctctg

SEQ ID NO: 114460 - DNA, 21 bp, Artificial Sequence
  primer
cagctgccaggactctgtaac

SEQ ID NO: 114461 - DNA, 21 bp, Artificial Sequence
  primer
tggagaatagaatcccaagcg

SEQ ID NO: 114462 - DNA, 20 bp, Artificial Sequence
  primer
ggtgacagcctgagatggac

SEQ ID NO: 114463 - DNA, 21 bp, Artificial Sequence
  primer
gtaggcacccagttctcatgg

SEQ ID NO: 114464 - DNA, 21 bp, Artificial Sequence
  primer
tgttgcaccaatccaattctc

SEQ ID NO: 114465 - DNA, 21 bp, Artificial Sequence
  primer
tcctccagcctgtaatcgaac

SEQ ID NO: 114466 - DNA, 21 bp, Artificial Sequence
  primer
ctccctgtgtggccataattc

SEQ ID NO: 114467 - DNA, 21 bp, Artificial Sequence
  primer
ttgtcagagatggtgagcgtc

SEQ ID NO: 114468 - DNA, 38 bp, Artificial Sequence
  primer
gtaaaacgacggccagtataatttggtggagaggtggg

SEQ ID NO: 114469 - DNA, 38 bp, Artificial Sequence
  primer
gtaaaacgacggccagtttgtaggccttcagtgctgtg

SEQ ID NO: 114470 - DNA, 37 bp, Artificial Sequence
  primer
gtaaaacgacggccagtagttgtccttggtgtggcct

SEQ ID NO: 114471 - DNA, 20 bp, Artificial Sequence
  primer
ctgcatgaacctgaggatgg

SEQ ID NO: 114472 - DNA, 37 bp, Artificial Sequence
  primer
gtaaaacgacggccagtaggaaggcctgaaattggtg

SEQ ID NO: 114473 - DNA, 21 bp, Artificial Sequence
  primer
ctgttagtggtgactgcaggg

SEQ ID NO: 114474 - DNA, 38 bp, Artificial Sequence
  primer
gtaaaacgacggccagtaaagcatgggtcagtcaaacc

SEQ ID NO: 114475 - DNA, 21 bp, Artificial Sequence
  primer
ctgagatctgccctgactgtg

SEQ ID NO: 114476 - DNA, 18 bp, Artificial Sequence
  primer
gcatggcatccagtgtcc

SEQ ID NO: 114477 - DNA, 21 bp, Artificial Sequence
  primer
ggaaatggaggcttagacagg

SEQ ID NO: 114478 - DNA, 37 bp, Artificial Sequence
  primer
gtaaaacgacggccagttggagtcagggctgagtgag

SEQ ID NO: 114479 - DNA, 39 bp, Artificial Sequence
  primer
gtaaaacgacggccagtaatggatggctactgattgagg

SEQ ID NO: 114480 - DNA, 38 bp, Artificial Sequence
  primer
gtaaaacgacggccagtagcccacagttccttctgttc

SEQ ID NO: 114481 - DNA, 38 bp, Artificial Sequence
  primer
gtaaaacgacggccagtagctcctctccagcttcactg

SEQ ID NO: 114482 - DNA, 21 bp, Artificial Sequence
  primer
tcatccaggatcctctgtgtc

SEQ ID NO: 114483 - DNA, 21 bp, Artificial Sequence
  primer
gaggctggtcagagacagagg

SEQ ID NO: 114484 - DNA, 37 bp, Artificial Sequence
  primer
gtaaaacgacggccagttgactgagtgagcggagagc

SEQ ID NO: 114485 - DNA, 21 bp, Artificial Sequence
  primer
agggtaggaaggaggcagaag

SEQ ID NO: 114486 - DNA, 36 bp, Artificial Sequence
  primer
gtaaaacgacggccagtggttgcagggactgagagc

SEQ ID NO: 114487 - DNA, 21 bp, Artificial Sequence
  primer
ctgcttgtacgtctgtggtgg

SEQ ID NO: 114488 - DNA, 21 bp, Artificial Sequence
  primer
ggaagtgctagaaaggcttcg

SEQ ID NO: 114489 - DNA, 22 bp, Artificial Sequence
  primer
ggtcaaagagcagaaggtaggg

SEQ ID NO: 114490 - DNA, 21 bp, Artificial Sequence
  primer
gccagtgaacacagttgtgag

SEQ ID NO: 114491 - DNA, 21 bp, Artificial Sequence
  primer
ttccttccaccctgttctcag

SEQ ID NO: 114492 - DNA, 20 bp, Artificial Sequence
  primer
cttagagaaggcgcccagac

SEQ ID NO: 114493 - DNA, 21 bp, Artificial Sequence
  primer
gcctggccaagtagtctatcc

SEQ ID NO: 114494 - DNA, 19 bp, Artificial Sequence
  primer
ccctctctatggagctgcg

SEQ ID NO: 114495 - DNA, 38 bp, Artificial Sequence
  primer
gtaaaacgacggccagtagagtgcttggcatgattctc

SEQ ID NO: 114496 - DNA, 21 bp, Artificial Sequence
  primer
acttgaactccatcacctggg

SEQ ID NO: 114497 - DNA, 22 bp, Artificial Sequence
  primer
ccgtgtacttgaggacctatgg

SEQ ID NO: 114498 - DNA, 21 bp, Artificial Sequence
  primer
gatgggatggattgactgatg

SEQ ID NO: 114499 - DNA, 37 bp, Artificial Sequence
  primer
gtaaaacgacggccagtgggcaaaggaatactgtggg

SEQ ID NO: 114500 - DNA, 20 bp, Artificial Sequence
  primer
cacctggcccatagtaaccc

SEQ ID NO: 114501 - DNA, 37 bp, Artificial Sequence
  primer
gtaaaacgacggccagtcttctggcttgggtctttcc

SEQ ID NO: 114502 - DNA, 38 bp, Artificial Sequence
  primer
gtaaaacgacggccagtataagtgactggcttgggctg

SEQ ID NO: 114503 - DNA, 21 bp, Artificial Sequence
  primer
gtcctcatgcaagcagctaag

SEQ ID NO: 114504 - DNA, 20 bp, Artificial Sequence
  primer
tgagcgacaaagtgagaccc

SEQ ID NO: 114505 - DNA, 21 bp, Artificial Sequence
  primer
aagatgccagatgatgcagac

SEQ ID NO: 114506 - DNA, 36 bp, Artificial Sequence
  primer
gtaaaacgacggccagttcctggccaaatgctgaac

SEQ ID NO: 114507 - DNA, 38 bp, Artificial Sequence
  primer
gtaaaacgacggccagtgccataagagccagtgaattg

SEQ ID NO: 114508 - DNA, 20 bp, Artificial Sequence
  primer
gcccagctcctacctgacac

SEQ ID NO: 114509 - DNA, 21 bp, Artificial Sequence
  primer
ctggagaatgggtgtgaggac

SEQ ID NO: 114510 - DNA, 18 bp, Artificial Sequence
  primer
ccatcctggctaacacgg

SEQ ID NO: 114511 - DNA, 38 bp, Artificial Sequence
  primer
gtaaaacgacggccagtctggaaactgacccaacttca

SEQ ID NO: 114512 - DNA, 21 bp, Artificial Sequence
  primer
ccaggccttagcttcaatttc

SEQ ID NO: 114513 - DNA, 21 bp, Artificial Sequence
  primer
cgacagcctggagatcagttc

SEQ ID NO: 114514 - DNA, 25 bp, Artificial Sequence
  primer
gactgagagcattagaaatggtttg

SEQ ID NO: 114515 - DNA, 21 bp, Artificial Sequence
  primer
tcattctctaccttgccaccc

SEQ ID NO: 114516 - DNA, 20 bp, Artificial Sequence
  primer
aagaattccaccttgggcag

SEQ ID NO: 114517 - DNA, 37 bp, Artificial Sequence
  primer
gtaaaacgacggccagtgtgtttgccagatgcctgag

SEQ ID NO: 114518 - DNA, 39 bp, Artificial Sequence
  primer
gtaaaacgacggccagttgagatcttcaagggtattggg

SEQ ID NO: 114519 - DNA, 38 bp, Artificial Sequence
  primer
gtaaaacgacggccagtgccaagtttgttaaagtgccc

SEQ ID NO: 114520 - DNA, 21 bp, Artificial Sequence
  primer
tggctagagactcctggcttc

SEQ ID NO: 114521 - DNA, 19 bp, Artificial Sequence
  primer
gatcaagcaaccctcccac

SEQ ID NO: 114522 - DNA, 23 bp, Artificial Sequence
  primer
ccacacacacagaactctggatt

SEQ ID NO: 114523 - DNA, 38 bp, Artificial Sequence
  primer
gtaaaacgacggccagttaaatatcaaggccgagcagg

SEQ ID NO: 114524 - DNA, 38 bp, Artificial Sequence
  primer
gtaaaacgacggccagtaaaggttacctggcctttgtt

SEQ ID NO: 114525 - DNA, 21 bp, Artificial Sequence
  primer
ctgagaaaggagacctccacc

SEQ ID NO: 114526 - DNA, 38 bp, Artificial Sequence
  primer
gtaaaacgacggccagtgatattggaatggatggtccc

SEQ ID NO: 114527 - DNA, 21 bp, Artificial Sequence
  primer
cagtgagctgaatttgaaggg

SEQ ID NO: 114528 - DNA, 21 bp, Artificial Sequence
  primer
ccatctccatgaggaaaccag

SEQ ID NO: 114529 - DNA, 22 bp, Artificial Sequence
  primer
gagagaagtgaacagggcaatg

SEQ ID NO: 114530 - DNA, 43 bp, Artificial Sequence
  primer
gtaaaacgacggccagtttacagttacagtcctcacaactctg

SEQ ID NO: 114531 - DNA, 21 bp, Artificial Sequence
  primer
ccttgcacaagaaggtcaaga

SEQ ID NO: 114532 - DNA, 21 bp, Artificial Sequence
  primer
tcaactctgtgctccaactcg

SEQ ID NO: 114533 - DNA, 21 bp, Artificial Sequence
  primer
aaagccattacctcgaccaag

SEQ ID NO: 114534 - DNA, 40 bp, Artificial Sequence
  primer
gtaaaacgacggccagtccattcataaagctctttcaggc

SEQ ID NO: 114535 - DNA, 22 bp, Artificial Sequence
  primer
tgagctaccatactcagccaca

SEQ ID NO: 114536 - DNA, 25 bp, Artificial Sequence
  primer
cactctaaagtcctcaaatttgctc

SEQ ID NO: 114537 - DNA, 24 bp, Artificial Sequence
  primer
catgaaactggcaacattaatacg

SEQ ID NO: 114538 - DNA, 39 bp, Artificial Sequence
  primer
gtaaaacgacggccagttttgcatgaccttgagaaagtt

SEQ ID NO: 114539 - DNA, 21 bp, Artificial Sequence
  primer
ctctgaactctgcctgctttg

SEQ ID NO: 114540 - DNA, 40 bp, Artificial Sequence
  primer
gtaaaacgacggccagtccctaatacaatgacgatgatgg

SEQ ID NO: 114541 - DNA, 38 bp, Artificial Sequence
  primer
gtaaaacgacggccagtaaaggatttgaggcagtcagc

SEQ ID NO: 114542 - DNA, 38 bp, Artificial Sequence
  primer
gtaaaacgacggccagtgtacatgcagcccaatacacc

SEQ ID NO: 114543 - DNA, 39 bp, Artificial Sequence
  primer
gtaaaacgacggccagtgcaagtagaggctatgctgagg

SEQ ID NO: 114544 - DNA, 38 bp, Artificial Sequence
  primer
gtaaaacgacggccagtactgggactcatctctccagg

SEQ ID NO: 114545 - DNA, 25 bp, Artificial Sequence
  primer
gacggttagcctgatttaatctttc

SEQ ID NO: 114546 - DNA, 21 bp, Artificial Sequence
  primer
ttattacctggccctttgcag

SEQ ID NO: 114547 - DNA, 38 bp, Artificial Sequence
  primer
gtaaaacgacggccagtggttgcacctccataacacag

SEQ ID NO: 114548 - DNA, 20 bp, Artificial Sequence
  primer
tttgcacagcctctgacatc

SEQ ID NO: 114549 - DNA, 21 bp, Artificial Sequence
  primer
agcagagcctgatttgacctg

SEQ ID NO: 114550 - DNA, 21 bp, Artificial Sequence
  primer
tttgcacacagatgacactcg

SEQ ID NO: 114551 - DNA, 38 bp, Artificial Sequence
  primer
gtaaaacgacggccagttgcacccaagacaaacacaac

SEQ ID NO: 114552 - DNA, 21 bp, Artificial Sequence
  primer
tcgtttcctctcattccttcc

SEQ ID NO: 114553 - DNA, 40 bp, Artificial Sequence
  primer
gtaaaacgacggccagtgcactcagaatttaacagaaggg

SEQ ID NO: 114554 - DNA, 21 bp, Artificial Sequence
  primer
ccaaatcgaccagaatcttcc

SEQ ID NO: 114555 - DNA, 23 bp, Artificial Sequence
  primer
caaaccacttaacagtgcaaacc

SEQ ID NO: 114556 - DNA, 21 bp, Artificial Sequence
  primer
taatggcctacagggacttgg

SEQ ID NO: 114557 - DNA, 40 bp, Artificial Sequence
  primer
gtaaaacgacggccagtccaccatccaggcatatactttc

SEQ ID NO: 114558 - DNA, 42 bp, Artificial Sequence
  primer
gtaaaacgacggccagtttgctttagtatcaattagccacaa

SEQ ID NO: 114559 - DNA, 21 bp, Artificial Sequence
  primer
tcaagcagcaagattccagtc

SEQ ID NO: 114560 - DNA, 21 bp, Artificial Sequence
  primer
gggagccctgacataattgac

SEQ ID NO: 114561 - DNA, 39 bp, Artificial Sequence
  primer
gtaaaacgacggccagtcatcgacaagtgaatcgaactc

SEQ ID NO: 114562 - DNA, 20 bp, Artificial Sequence
  primer
atgaaggttgccaagagctg

SEQ ID NO: 114563 - DNA, 20 bp, Artificial Sequence
  primer
gggcaaggcaagatcttctg

SEQ ID NO: 114564 - DNA, 38 bp, Artificial Sequence
  primer
gtaaaacgacggccagtatcagggatgggactacccag

SEQ ID NO: 114565 - DNA, 18 bp, Artificial Sequence
  primer
gcatcatgcttcctgggc

SEQ ID NO: 114566 - DNA, 38 bp, Artificial Sequence
  primer
gtaaaacgacggccagtctaaggcccaagcaacaactc

SEQ ID NO: 114567 - DNA, 41 bp, Artificial Sequence
  primer
gtaaaacgacggccagttcttccaaagatacaaagggaaac

SEQ ID NO: 114568 - DNA, 21 bp, Artificial Sequence
  primer
gccatgagaaacgtgcttaac

SEQ ID NO: 114569 - DNA, 18 bp, Artificial Sequence
  primer
catgctagcacagcctgc

SEQ ID NO: 114570 - DNA, 21 bp, Artificial Sequence
  primer
aagcccttgtgcacttctctc

SEQ ID NO: 114571 - DNA, 21 bp, Artificial Sequence
  primer
atggatatgatggcatctcgg

SEQ ID NO: 114572 - DNA, 37 bp, Artificial Sequence
  primer
gtaaaacgacggccagtcttggccaaatctgggagtc

SEQ ID NO: 114573 - DNA, 21 bp, Artificial Sequence
  primer
ccagcaaacatctcaaagacg

SEQ ID NO: 114574 - DNA, 21 bp, Artificial Sequence
  primer
aggtacgctccagatacaggc

SEQ ID NO: 114575 - DNA, 23 bp, Artificial Sequence
  primer
tggaaagcacttacctactgagg

SEQ ID NO: 114576 - DNA, 38 bp, Artificial Sequence
  primer
gtaaaacgacggccagttaaatttcaccagctggcatc

SEQ ID NO: 114577 - DNA, 21 bp, Artificial Sequence
  primer
tccctggagaggaagttgttc

SEQ ID NO: 114578 - DNA, 21 bp, Artificial Sequence
  primer
atttcatgggtgcttctttcc

SEQ ID NO: 114579 - DNA, 38 bp, Artificial Sequence
  primer
gtaaaacgacggccagtctgctgctggcattgacttag

SEQ ID NO: 114580 - DNA, 39 bp, Artificial Sequence
  primer
gtaaaacgacggccagtcgctgacctagaaattgatgtg

SEQ ID NO: 114581 - DNA, 21 bp, Artificial Sequence
  primer
ccatgaacatttgcactttcc

SEQ ID NO: 114582 - DNA, 38 bp, Artificial Sequence
  primer
gtaaaacgacggccagtctggtgagttagagccacagg

SEQ ID NO: 114583 - DNA, 22 bp, Artificial Sequence
  primer
gcacatgagaaacaatttcacc

SEQ ID NO: 114584 - DNA, 38 bp, Artificial Sequence
  primer
gtaaaacgacggccagtcatcaatgtggtggagaggtc

SEQ ID NO: 114585 - DNA, 21 bp, Artificial Sequence
  primer
ttggtcttggagtgtaggtgc

SEQ ID NO: 114586 - DNA, 38 bp, Artificial Sequence
  primer
gtaaaacgacggccagtcccaattaggttgcaggattc

SEQ ID NO: 114587 - DNA, 37 bp, Artificial Sequence
  primer
gtaaaacgacggccagtgtctgatcacactgcccacc

SEQ ID NO: 114588 - DNA, 20 bp, Artificial Sequence
  primer
cagaggttgcaatgatcacg

SEQ ID NO: 114589 - DNA, 19 bp, Artificial Sequence
  primer
ccctgtgggaagcaaattc

SEQ ID NO: 114590 - DNA, 25 bp, Artificial Sequence
  primer
gaaatggtgcttaatacatcacctg

SEQ ID NO: 114591 - DNA, 38 bp, Artificial Sequence
  primer
gtaaaacgacggccagtaacacttccaccagatcctcc

SEQ ID NO: 114592 - DNA, 21 bp, Artificial Sequence
  primer
gccacatgaatgttccatttc

SEQ ID NO: 114593 - DNA, 21 bp, Artificial Sequence
  primer
actgcttgcactctgcaaatc

SEQ ID NO: 114594 - DNA, 37 bp, Artificial Sequence
  primer
gtaaaacgacggccagtacatgcctgggttgattctg

SEQ ID NO: 114595 - DNA, 37 bp, Artificial Sequence
  primer
gtaaaacgacggccagtagtgcaaacatccactgctg

SEQ ID NO: 114596 - DNA, 21 bp, Artificial Sequence
  primer
gcacacacagagatcacctgg

SEQ ID NO: 114597 - DNA, 25 bp, Artificial Sequence
  primer
tctaggtggtggttgtatgagtaaa

SEQ ID NO: 114598 - DNA, 21 bp, Artificial Sequence
  primer
caggagataatgccaattccc

SEQ ID NO: 114599 - DNA, 38 bp, Artificial Sequence
  primer
gtaaaacgacggccagtcacaaagctccgtctgcatag

SEQ ID NO: 114600 - DNA, 20 bp, Artificial Sequence
  primer
gctgcttgaggattggtgag

SEQ ID NO: 114601 - DNA, 39 bp, Artificial Sequence
  primer
gtaaaacgacggccagtgtgaggagatgctgagaaacag

SEQ ID NO: 114602 - DNA, 36 bp, Artificial Sequence
  primer
gtaaaacgacggccagtatgggaacagtgcagcaac

SEQ ID NO: 114603 - DNA, 21 bp, Artificial Sequence
  primer
gatgcctgtgacagtagcagc

SEQ ID NO: 114604 - DNA, 38 bp, Artificial Sequence
  primer
gtaaaacgacggccagttaagtctcagcctttcccacg

SEQ ID NO: 114605 - DNA, 36 bp, Artificial Sequence
  primer
gtaaaacgacggccagtgagtgtgtcaccacccacg

SEQ ID NO: 114606 - DNA, 37 bp, Artificial Sequence
  primer
gtaaaacgacggccagtccatgcttcacctcagcatc

SEQ ID NO: 114607 - DNA, 22 bp, Artificial Sequence
  primer
aacagaggtattgactggcagc

SEQ ID NO: 114608 - DNA, 19 bp, Artificial Sequence
  primer
cttcctcccaaggcagttg

SEQ ID NO: 114609 - DNA, 35 bp, Artificial Sequence
  primer
gtaaaacgacggccagtggcctcaagtaatccgcc

SEQ ID NO: 114610 - DNA, 21 bp, Artificial Sequence
  primer
tattgaaagacccacccatcc

SEQ ID NO: 114611 - DNA, 21 bp, Artificial Sequence
  primer
gtcaaagcccttgctgcttac

SEQ ID NO: 114612 - DNA, 21 bp, Artificial Sequence
  primer
aagcaacgacacacactggac

SEQ ID NO: 114613 - DNA, 19 bp, Artificial Sequence
  primer
ttctcatggtagggaggcg

SEQ ID NO: 114614 - DNA, 38 bp, Artificial Sequence
  primer
gtaaaacgacggccagtaatgggtgtaggactgatggg

SEQ ID NO: 114615 - DNA, 21 bp, Artificial Sequence
  primer
atctgcctttccacaaagctc

SEQ ID NO: 114616 - DNA, 38 bp, Artificial Sequence
  primer
gtaaaacgacggccagtccacagagcctggtattctgg

SEQ ID NO: 114617 - DNA, 21 bp, Artificial Sequence
  primer
acagagagtctagcacagccg

SEQ ID NO: 114618 - DNA, 38 bp, Artificial Sequence
  primer
gtaaaacgacggccagtcctacaagggtcgcagttctc

SEQ ID NO: 114619 - DNA, 38 bp, Artificial Sequence
  primer
gtaaaacgacggccagtgaatgcaaactccacatcctg

SEQ ID NO: 114620 - DNA, 38 bp, Artificial Sequence
  primer
gtaaaacgacggccagtagagttcagagcggtcctcag

SEQ ID NO: 114621 - DNA, 21 bp, Artificial Sequence
  primer
atggtgctgcctttcaagttc

SEQ ID NO: 114622 - DNA, 21 bp, Artificial Sequence
  primer
ttgacactccatttgtgctgg

SEQ ID NO: 114623 - DNA, 22 bp, Artificial Sequence
  primer
cagtgtttctgatacccaagcc

SEQ ID NO: 114624 - DNA, 21 bp, Artificial Sequence
  primer
ctctggagagggagcagtacc

SEQ ID NO: 114625 - DNA, 37 bp, Artificial Sequence
  primer
gtaaaacgacggccagtgaggaaatggctgcactgtc

SEQ ID NO: 114626 - DNA, 38 bp, Artificial Sequence
  primer
gtaaaacgacggccagttcttgaacagcctgtctttgc

SEQ ID NO: 114627 - DNA, 24 bp, Artificial Sequence
  primer
aaagaataagtcacaggtgcacag

SEQ ID NO: 114628 - DNA, 19 bp, Artificial Sequence
  primer
gaagacgtcgaggcaaacc

SEQ ID NO: 114629 - DNA, 21 bp, Artificial Sequence
  primer
gccaaatacggagagaagtgg

SEQ ID NO: 114630 - DNA, 35 bp, Artificial Sequence
  primer
gtaaaacgacggccagtaggttgcaatgagccacg

SEQ ID NO: 114631 - DNA, 38 bp, Artificial Sequence
  primer
gtaaaacgacggccagtaatgctttgaagccaagaagc

SEQ ID NO: 114632 - DNA, 38 bp, Artificial Sequence
  primer
gtaaaacgacggccagttcttcagtagcctgtcttggg

SEQ ID NO: 114633 - DNA, 20 bp, Artificial Sequence
  primer
gaccagcctgagcaacaaag

SEQ ID NO: 114634 - DNA, 20 bp, Artificial Sequence
  primer
tgcacagcagaataggcttg

SEQ ID NO: 114635 - DNA, 36 bp, Artificial Sequence
  primer
gtaaaacgacggccagtgatgccagtgggacaaacc

SEQ ID NO: 114636 - DNA, 21 bp, Artificial Sequence
  primer
cgtacatgacagagtcctggc

SEQ ID NO: 114637 - DNA, 21 bp, Artificial Sequence
  primer
atatcccagcgacctgacttg

SEQ ID NO: 114638 - DNA, 21 bp, Artificial Sequence
  primer
gctgtgggtgtcactagatgg

SEQ ID NO: 114639 - DNA, 21 bp, Artificial Sequence
  primer
tgtgttcaggtgtttgggaac

SEQ ID NO: 114640 - DNA, 38 bp, Artificial Sequence
  primer
gtaaaacgacggccagttagcttgatttgcccttgagc

SEQ ID NO: 114641 - DNA, 21 bp, Artificial Sequence
  primer
tctgttcattgctggaaggtg

SEQ ID NO: 114642 - DNA, 44 bp, Artificial Sequence
  primer
gtaaaacgacggccagttgtgattcaaattactgtggatatgag

SEQ ID NO: 114643 - DNA, 21 bp, Artificial Sequence
  primer
aaacatccctcagtgggaaac

SEQ ID NO: 114644 - DNA, 39 bp, Artificial Sequence
  primer
gtaaaacgacggccagtggaaattcacaaccaaggatca

SEQ ID NO: 114645 - DNA, 38 bp, Artificial Sequence
  primer
gtaaaacgacggccagttctggctctttctccaccttc

SEQ ID NO: 114646 - DNA, 38 bp, Artificial Sequence
  primer
gtaaaacgacggccagtctcatttgctatccctttgcc

SEQ ID NO: 114647 - DNA, 21 bp, Artificial Sequence
  primer
aaacaaacagcccgatatgga

SEQ ID NO: 114648 - DNA, 21 bp, Artificial Sequence
  primer
ttgcactgagaaagcctcttg

SEQ ID NO: 114649 - DNA, 21 bp, Artificial Sequence
  primer
ggttacaggtgtgagccactg

SEQ ID NO: 114650 - DNA, 21 bp, Artificial Sequence
  primer
ccatcgcactggtcatatgtt

SEQ ID NO: 114651 - DNA, 21 bp, Artificial Sequence
  primer
gtaaagatggtgaagccatgc

SEQ ID NO: 114652 - DNA, 38 bp, Artificial Sequence
  primer
gtaaaacgacggccagtcagtgcttagccaatacgctc

SEQ ID NO: 114653 - DNA, 38 bp, Artificial Sequence
  primer
gtaaaacgacggccagtaccaggaataggttcattgcc

SEQ ID NO: 114654 - DNA, 21 bp, Artificial Sequence
  primer
accctgatgtctgtgatgctg

SEQ ID NO: 114655 - DNA, 21 bp, Artificial Sequence
  primer
attccgtccaggagaactgag

SEQ ID NO: 114656 - DNA, 39 bp, Artificial Sequence
  primer
gtaaaacgacggccagtcccaagacatccctaactttcc

SEQ ID NO: 114657 - DNA, 21 bp, Artificial Sequence
  primer
gatgcctacttcccacaggag

SEQ ID NO: 114658 - DNA, 21 bp, Artificial Sequence
  primer
tttggaggttcttgtgtctgc

SEQ ID NO: 114659 - DNA, 21 bp, Artificial Sequence
  primer
gcagctgagtgggattacagg

SEQ ID NO: 114660 - DNA, 21 bp, Artificial Sequence
  primer
aaaccaccttgaatctgccac

SEQ ID NO: 114661 - DNA, 39 bp, Artificial Sequence
  primer
gtaaaacgacggccagtaagaatggaagatggaagaggg

SEQ ID NO: 114662 - DNA, 38 bp, Artificial Sequence
  primer
gtaaaacgacggccagttacacaggcacctctgattgc

SEQ ID NO: 114663 - DNA, 38 bp, Artificial Sequence
  primer
gtaaaacgacggccagttagcagcctggcattatctcc

SEQ ID NO: 114664 - DNA, 21 bp, Artificial Sequence
  primer
ggctcactattcaacgtggtc

SEQ ID NO: 114665 - DNA, 20 bp, Artificial Sequence
  primer
tgtagatgatctgcgagggc

SEQ ID NO: 114666 - DNA, 21 bp, Artificial Sequence
  primer
ttgcctccagggactatgaag

SEQ ID NO: 114667 - DNA, 21 bp, Artificial Sequence
  primer
ggtgcgtaacttaatcccagc

SEQ ID NO: 114668 - DNA, 21 bp, Artificial Sequence
  primer
gtaaagggctcacctgtctgc

SEQ ID NO: 114669 - DNA, 23 bp, Artificial Sequence
  primer
tcgcaaagactgttaattcttcc

SEQ ID NO: 114670 - DNA, 38 bp, Artificial Sequence
  primer
gtaaaacgacggccagtatgtacagtggcaccacaagc

SEQ ID NO: 114671 - DNA, 21 bp, Artificial Sequence
  primer
gacagactgtggcacaccaac

SEQ ID NO: 114672 - DNA, 38 bp, Artificial Sequence
  primer
gtaaaacgacggccagtgggatggcacagtagtcaagg

SEQ ID NO: 114673 - DNA, 21 bp, Artificial Sequence
  primer
tggtccctgaggtggtagttc

SEQ ID NO: 114674 - DNA, 21 bp, Artificial Sequence
  primer
gtctccaacaggaagggaacc

SEQ ID NO: 114675 - DNA, 21 bp, Artificial Sequence
  primer
tcatccttgatctggttgtcg

SEQ ID NO: 114676 - DNA, 38 bp, Artificial Sequence
  primer
gtaaaacgacggccagtaaacacccagaagaacaaggg

SEQ ID NO: 114677 - DNA, 22 bp, Artificial Sequence
  primer
tccaggacaattctgaacaatg

SEQ ID NO: 114678 - DNA, 38 bp, Artificial Sequence
  primer
gtaaaacgacggccagtgtgtcctcttaattccgcacc

SEQ ID NO: 114679 - DNA, 37 bp, Artificial Sequence
  primer
gtaaaacgacggccagtagccttgcctaccctttctg

SEQ ID NO: 114680 - DNA, 21 bp, Artificial Sequence
  primer
actcagtgatcttgcctgcac

SEQ ID NO: 114681 - DNA, 21 bp, Artificial Sequence
  primer
gttcagcttctgcatctgtgc

SEQ ID NO: 114682 - DNA, 19 bp, Artificial Sequence
  primer
agcttcggtccatctgtcc

SEQ ID NO: 114683 - DNA, 38 bp, Artificial Sequence
  primer
gtaaaacgacggccagtcctaacgtgtggctgagactg

SEQ ID NO: 114684 - DNA, 38 bp, Artificial Sequence
  primer
gtaaaacgacggccagttgtttgaatgttgccttgagc

SEQ ID NO: 114685 - DNA, 38 bp, Artificial Sequence
  primer
gtaaaacgacggccagtttctcttccagctctggcttc

SEQ ID NO: 114686 - DNA, 38 bp, Artificial Sequence
  primer
gtaaaacgacggccagttgggtcaaggaatgcatgtag

SEQ ID NO: 114687 - DNA, 21 bp, Artificial Sequence
  primer
cattcacccaggttctgttcc

SEQ ID NO: 114688 - DNA, 21 bp, Artificial Sequence
  primer
cacgtctctcccacaacactc

SEQ ID NO: 114689 - DNA, 38 bp, Artificial Sequence
  primer
gtaaaacgacggccagtttgagatccctgctgtaaggg

SEQ ID NO: 114690 - DNA, 19 bp, Artificial Sequence
  primer
atcttcccagccaccatcc

SEQ ID NO: 114691 - DNA, 21 bp, Artificial Sequence
  primer
agcttaaacacgcacctggaa

SEQ ID NO: 114692 - DNA, 21 bp, Artificial Sequence
  primer
aagtgaatggaaatgggagga

SEQ ID NO: 114693 - DNA, 20 bp, Artificial Sequence
  primer
tacactgcagccctgtagcc

SEQ ID NO: 114694 - DNA, 20 bp, Artificial Sequence
  primer
gcagtaaggccacagtgctc

SEQ ID NO: 114695 - DNA, 37 bp, Artificial Sequence
  primer
gtaaaacgacggccagtcccttctcagctactgcctg

SEQ ID NO: 114696 - DNA, 21 bp, Artificial Sequence
  primer
gaggctcaatccaggatgttc

SEQ ID NO: 114697 - DNA, 39 bp, Artificial Sequence
  primer
gtaaaacgacggccagtgcatttgggtcttaacacatcc

SEQ ID NO: 114698 - DNA, 22 bp, Artificial Sequence
  primer
caaatgccatcagttatccagc

SEQ ID NO: 114699 - DNA, 37 bp, Artificial Sequence
  primer
gtaaaacgacggccagtagctgatttcatgccactgc

SEQ ID NO: 114700 - DNA, 21 bp, Artificial Sequence
  primer
taggtgcgtagtttaagcggc

SEQ ID NO: 114701 - DNA, 38 bp, Artificial Sequence
  primer
gtaaaacgacggccagttaagacaggcacctccctctg

SEQ ID NO: 114702 - DNA, 38 bp, Artificial Sequence
  primer
gtaaaacgacggccagtgaaacaggtccgttctcacag

SEQ ID NO: 114703 - DNA, 23 bp, Artificial Sequence
  primer
tctccaccagaggaatatttgtg

SEQ ID NO: 114704 - DNA, 26 bp, Artificial Sequence
  primer
gaccatctaagagaagcattacacac

SEQ ID NO: 114705 - DNA, 38 bp, Artificial Sequence
  primer
gtaaaacgacggccagtaaccacattggacctctcacc

SEQ ID NO: 114706 - DNA, 38 bp, Artificial Sequence
  primer
gtaaaacgacggccagtagcctccaaagtgatgtgagg

SEQ ID NO: 114707 - DNA, 21 bp, Artificial Sequence
  primer
agatatttgtgcgtctgcgtg

SEQ ID NO: 114708 - DNA, 39 bp, Artificial Sequence
  primer
gtaaaacgacggccagtttgaactgagccaatgtggtaa

SEQ ID NO: 114709 - DNA, 24 bp, Artificial Sequence
  primer
gatatcaggacatagtaggctccc

SEQ ID NO: 114710 - DNA, 27 bp, Artificial Sequence
  primer
tgaatcattctaaacactgttatttgc

SEQ ID NO: 114711 - DNA, 38 bp, Artificial Sequence
  primer
gtaaaacgacggccagttacctctgccttctgattggg

SEQ ID NO: 114712 - DNA, 20 bp, Artificial Sequence
  primer
gtgacccaaattgccaagag

SEQ ID NO: 114713 - DNA, 21 bp, Artificial Sequence
  primer
cagtcactccattcatcctgg

SEQ ID NO: 114714 - DNA, 43 bp, Artificial Sequence
  primer
gtaaaacgacggccagttgaaacagcttaagaataacactccc

SEQ ID NO: 114715 - DNA, 26 bp, Artificial Sequence
  primer
tctgaatcacttctatcacagagcac

SEQ ID NO: 114716 - DNA, 38 bp, Artificial Sequence
  primer
gtaaaacgacggccagttgctcagggccataatttcag

SEQ ID NO: 114717 - DNA, 20 bp, Artificial Sequence
  primer
acgtgcacacacacacacac

SEQ ID NO: 114718 - DNA, 27 bp, Artificial Sequence
  primer
caacatcagaatcactgtcttcattac

SEQ ID NO: 114719 - DNA, 22 bp, Artificial Sequence
  primer
tttgtcaacttcaaattggctc

SEQ ID NO: 114720 - DNA, 38 bp, Artificial Sequence
  primer
gtaaaacgacggccagtagcacagtgtgtgagacccag

SEQ ID NO: 114721 - DNA, 22 bp, Artificial Sequence
  primer
aaagcttgaggcccataaagtc

SEQ ID NO: 114722 - DNA, 38 bp, Artificial Sequence
  primer
gtaaaacgacggccagtatggaaggcaatgctataggg

SEQ ID NO: 114723 - DNA, 41 bp, Artificial Sequence
  primer
gtaaaacgacggccagtggaagtttcacagaaatttaccca

SEQ ID NO: 114724 - DNA, 38 bp, Artificial Sequence
  primer
gtaaaacgacggccagtcaaacaagcaagccagagatg

SEQ ID NO: 114725 - DNA, 22 bp, Artificial Sequence
  primer
aaagagaacttggctgcctatc

SEQ ID NO: 114726 - DNA, 38 bp, Artificial Sequence
  primer
gtaaaacgacggccagtaactagtggctgaatgccagg

SEQ ID NO: 114727 - DNA, 47 bp, Artificial Sequence
  primer
gtaaaacgacggccagtaaactatatgaaggctattattgtaatgga

SEQ ID NO: 114728 - DNA, 21 bp, Artificial Sequence
  primer
tttccacaattcctcactccc

SEQ ID NO: 114729 - DNA, 21 bp, Artificial Sequence
  primer
tcttatcccagtgatggaagc

SEQ ID NO: 114730 - DNA, 38 bp, Artificial Sequence
  primer
gtaaaacgacggccagtgcaacccttgttataaacccg

SEQ ID NO: 114731 - DNA, 44 bp, Artificial Sequence
  primer
gtaaaacgacggccagttgaagcttacaataggtaatgtctgag

SEQ ID NO: 114732 - DNA, 41 bp, Artificial Sequence
  primer
gtaaaacgacggccagttgattacaaacatgattctttgcc

SEQ ID NO: 114733 - DNA, 22 bp, Artificial Sequence
  primer
aaggaagcaaggtctgtgtcag

SEQ ID NO: 114734 - DNA, 21 bp, Artificial Sequence
  primer
acatttggtccacacaacctg

SEQ ID NO: 114735 - DNA, 38 bp, Artificial Sequence
  primer
gtaaaacgacggccagtgacatatgaccagggagatgc

SEQ ID NO: 114736 - DNA, 21 bp, Artificial Sequence
  primer
atcctttgtcaacaagcccag

SEQ ID NO: 114737 - DNA, 40 bp, Artificial Sequence
  primer
gtaaaacgacggccagttttaaagtgatgctctccagcac

SEQ ID NO: 114738 - DNA, 38 bp, Artificial Sequence
  primer
gtaaaacgacggccagttgctcagagtgcataggttgg

SEQ ID NO: 114739 - DNA, 21 bp, Artificial Sequence
  primer
ctgcctgtgtatccctcttgg

SEQ ID NO: 114740 - DNA, 30 bp, Artificial Sequence
  primer
cagcaaatacagttgttctactaattctgt

SEQ ID NO: 114741 - DNA, 39 bp, Artificial Sequence
  primer
gtaaaacgacggccagtaatgcagttacactgccatctg

SEQ ID NO: 114742 - DNA, 22 bp, Artificial Sequence
  primer
atatgtgggatccatgtttgaa

SEQ ID NO: 114743 - DNA, 23 bp, Artificial Sequence
  primer
actgttcactttcttcacacacg

SEQ ID NO: 114744 - DNA, 18 bp, Artificial Sequence
  primer
gtggagcctgcagtgagc

SEQ ID NO: 114745 - DNA, 38 bp, Artificial Sequence
  primer
gtaaaacgacggccagtacgtgggtgatttatcatggc

SEQ ID NO: 114746 - DNA, 37 bp, Artificial Sequence
  primer
gtaaaacgacggccagtccggagcctaactccttgag

SEQ ID NO: 114747 - DNA, 21 bp, Artificial Sequence
  primer
ctctttctgtgtgggtcttgg

SEQ ID NO: 114748 - DNA, 22 bp, Artificial Sequence
  primer
aatacccatgctgaaacattcc

SEQ ID NO: 114749 - DNA, 22 bp, Artificial Sequence
  primer
gagcatctactgtgtctcaggc

SEQ ID NO: 114750 - DNA, 37 bp, Artificial Sequence
  primer
gtaaaacgacggccagtagggagaggaccatggtgtg

SEQ ID NO: 114751 - DNA, 39 bp, Artificial Sequence
  primer
gtaaaacgacggccagttctatgacaaaggttgacaggg

SEQ ID NO: 114752 - DNA, 26 bp, Artificial Sequence
  primer
ttctttctaacttcgctcttctgttt

SEQ ID NO: 114753 - DNA, 38 bp, Artificial Sequence
  primer
gtaaaacgacggccagtcttcaagcatccctgaaagaa

SEQ ID NO: 114754 - DNA, 37 bp, Artificial Sequence
  primer
gtaaaacgacggccagtaaatagccaccagggcaaat

SEQ ID NO: 114755 - DNA, 19 bp, Artificial Sequence
  primer
ctccgcctcctgcacttac

SEQ ID NO: 114756 - DNA, 39 bp, Artificial Sequence
  primer
gtaaaacgacggccagtaaccagtagagcatttccttgc

SEQ ID NO: 114757 - DNA, 27 bp, Artificial Sequence
  primer
cataacactgatgatgctttaatacaa

SEQ ID NO: 114758 - DNA, 22 bp, Artificial Sequence
  primer
cctgtaaagataagacgggtcg

SEQ ID NO: 114759 - DNA, 38 bp, Artificial Sequence
  primer
gtaaaacgacggccagtcatcaaagacccttggtgtcc

SEQ ID NO: 114760 - DNA, 21 bp, Artificial Sequence
  primer
tttctctgaaatggctggagg

SEQ ID NO: 114761 - DNA, 38 bp, Artificial Sequence
  primer
gtaaaacgacggccagtgcttgcatctgctactgctct

SEQ ID NO: 114762 - DNA, 22 bp, Artificial Sequence
  primer
aacaaacctttcccaaggactc

SEQ ID NO: 114763 - DNA, 44 bp, Artificial Sequence
  primer
gtaaaacgacggccagtaaggagagaaactcagtcctattacaa

SEQ ID NO: 114764 - DNA, 21 bp, Artificial Sequence
  primer
tccctcacatccttccatttc

SEQ ID NO: 114765 - DNA, 38 bp, Artificial Sequence
  primer
gtaaaacgacggccagtcgaagccaaaggaatcaaatc

SEQ ID NO: 114766 - DNA, 21 bp, Artificial Sequence
  primer
ttccatgcccaggtatacagt

SEQ ID NO: 114767 - DNA, 22 bp, Artificial Sequence
  primer
tgctttcaagaaggtcaagcac

SEQ ID NO: 114768 - DNA, 27 bp, Artificial Sequence
  primer
aagttactaaatcacttagcccaaaca

SEQ ID NO: 114769 - DNA, 21 bp, Artificial Sequence
  primer
aaacagcaggcagcatgtaaa

SEQ ID NO: 114770 - DNA, 29 bp, Artificial Sequence
  primer
tttgctataactgtatcctagctaatcct

SEQ ID NO: 114771 - DNA, 38 bp, Artificial Sequence
  primer
gtaaaacgacggccagtttacgccaaagctaggaggtc

SEQ ID NO: 114772 - DNA, 21 bp, Artificial Sequence
  primer
ggatggaaacacgattcacac

SEQ ID NO: 114773 - DNA, 38 bp, Artificial Sequence
  primer
gtaaaacgacggccagtccctcctttcttcttcctcac

SEQ ID NO: 114774 - DNA, 21 bp, Artificial Sequence
  primer
tgctttccacttgccaattac

SEQ ID NO: 114775 - DNA, 39 bp, Artificial Sequence
  primer
gtaaaacgacggccagtgaacaactggctgggatttatg

SEQ ID NO: 114776 - DNA, 23 bp, Artificial Sequence
  primer
aaacatgggtgtgaatgtaaagc

SEQ ID NO: 114777 - DNA, 40 bp, Artificial Sequence
  primer
gtaaaacgacggccagtcgacctaacatacactgtccagc

SEQ ID NO: 114778 - DNA, 21 bp, Artificial Sequence
  primer
ctcagtaacccaggccacaag

SEQ ID NO: 114779 - DNA, 39 bp, Artificial Sequence
  primer
gtaaaacgacggccagtcctcacagaattcctccatcag

SEQ ID NO: 114780 - DNA, 22 bp, Artificial Sequence
  primer
aatcaaatggagcaggaatttg

SEQ ID NO: 114781 - DNA, 22 bp, Artificial Sequence
  primer
ttctgagggaagatgtattggg

SEQ ID NO: 114782 - DNA, 38 bp, Artificial Sequence
  primer
gtaaaacgacggccagtgcacccttagagatgcacaga

SEQ ID NO: 114783 - DNA, 38 bp, Artificial Sequence
  primer
gtaaaacgacggccagtcaaaggagaagcacagagtgg

SEQ ID NO: 114784 - DNA, 22 bp, Artificial Sequence
  primer
aacagcaatgtaagaaatggca

SEQ ID NO: 114785 - DNA, 21 bp, Artificial Sequence
  primer
ccctcacaaacctcctactgg

SEQ ID NO: 114786 - DNA, 20 bp, Artificial Sequence
  primer
cattgcatgcctctaccaaa

SEQ ID NO: 114787 - DNA, 38 bp, Artificial Sequence
  primer
gtaaaacgacggccagtcgctgtgtagaacatctggac

SEQ ID NO: 114788 - DNA, 41 bp, Artificial Sequence
  primer
gtaaaacgacggccagtggtctaaagatgtactttctgccc

SEQ ID NO: 114789 - DNA, 38 bp, Artificial Sequence
  primer
gtaaaacgacggccagtcctgccttcaactttcagaag

SEQ ID NO: 114790 - DNA, 21 bp, Artificial Sequence
  primer
accacaatgctagggacacat

SEQ ID NO: 114791 - DNA, 39 bp, Artificial Sequence
  primer
gtaaaacgacggccagttttggaatcatttatggcattg

SEQ ID NO: 114792 - DNA, 21 bp, Artificial Sequence
  primer
tcgagtgatttgttactccgc

SEQ ID NO: 114793 - DNA, 27 bp, Artificial Sequence
  primer
aagatccaatatattactgtctcccac

SEQ ID NO: 114794 - DNA, 44 bp, Artificial Sequence
  primer
gtaaaacgacggccagttcctctaattaaatgtggttactgttt

SEQ ID NO: 114795 - DNA, 38 bp, Artificial Sequence
  primer
gtaaaacgacggccagtaaattccactgcatcccactc

SEQ ID NO: 114796 - DNA, 21 bp, Artificial Sequence
  primer
agcaatcgtccaatagcaatg

SEQ ID NO: 114797 - DNA, 21 bp, Artificial Sequence
  primer
ttctgctcctggcattctaaa

SEQ ID NO: 114798 - DNA, 21 bp, Artificial Sequence
  primer
gattccacggttcattcagtg

SEQ ID NO: 114799 - DNA, 21 bp, Artificial Sequence
  primer
aattccatgcctccatttctg

SEQ ID NO: 114800 - DNA, 21 bp, Artificial Sequence
  primer
aatttggcttgcagcataaag

SEQ ID NO: 114801 - DNA, 39 bp, Artificial Sequence
  primer
gtaaaacgacggccagtactatttcccatgtgagcaagc

SEQ ID NO: 114802 - DNA, 19 bp, Artificial Sequence
  primer
gagaggaggaagccagcag

SEQ ID NO: 114803 - DNA, 42 bp, Artificial Sequence
  primer
gtaaaacgacggccagtggactggagaggaaagtagagattc

SEQ ID NO: 114804 - DNA, 21 bp, Artificial Sequence
  primer
aacatgagctgtgccattcac

SEQ ID NO: 114805 - DNA, 21 bp, Artificial Sequence
  primer
agttcaagtgatcctcccacc

SEQ ID NO: 114806 - DNA, 38 bp, Artificial Sequence
  primer
gtaaaacgacggccagtttggaattctctgaagaccca

SEQ ID NO: 114807 - DNA, 38 bp, Artificial Sequence
  primer
gtaaaacgacggccagtcatagtgggagcttcacaacc

SEQ ID NO: 114808 - DNA, 38 bp, Artificial Sequence
  primer
gtaaaacgacggccagttgccacattgaatgcatcttt

SEQ ID NO: 114809 - DNA, 38 bp, Artificial Sequence
  primer
gtaaaacgacggccagttaaaggagcttggtctctggc

SEQ ID NO: 114810 - DNA, 24 bp, Artificial Sequence
  primer
tgtactttgagaatcacagatcgc

SEQ ID NO: 114811 - DNA, 19 bp, Artificial Sequence
  primer
tatgcgggcctttgagttc

SEQ ID NO: 114812 - DNA, 22 bp, Artificial Sequence
  primer
cacccgttgactagtctccaac

SEQ ID NO: 114813 - DNA, 20 bp, Artificial Sequence
  primer
gccacagggccattatatgc

SEQ ID NO: 114814 - DNA, 22 bp, Artificial Sequence
  primer
ggcaattatcacttcttggcct

SEQ ID NO: 114815 - DNA, 39 bp, Artificial Sequence
  primer
gtaaaacgacggccagtcccaggatatttggtttccttg

SEQ ID NO: 114816 - DNA, 21 bp, Artificial Sequence
  primer
catccaaggtcacccacttta

SEQ ID NO: 114817 - DNA, 21 bp, Artificial Sequence
  primer
gaacagaggcaaacgatgttg

SEQ ID NO: 114818 - DNA, 41 bp, Artificial Sequence
  primer
gtaaaacgacggccagtaaatctgcatatgggagataaagc

SEQ ID NO: 114819 - DNA, 38 bp, Artificial Sequence
  primer
gtaaaacgacggccagttgctctatggcaaatcgaaac

SEQ ID NO: 114820 - DNA, 38 bp, Artificial Sequence
  primer
gtaaaacgacggccagtaacaggaagacaccctgcatc

SEQ ID NO: 114821 - DNA, 38 bp, Artificial Sequence
  primer
gtaaaacgacggccagtcagcagttaacaagagcaggg

SEQ ID NO: 114822 - DNA, 40 bp, Artificial Sequence
  primer
gtaaaacgacggccagtgggtaaactacaggttgggaatc

SEQ ID NO: 114823 - DNA, 23 bp, Artificial Sequence
  primer
gcccatatgagaaggataagacc

SEQ ID NO: 114824 - DNA, 28 bp, Artificial Sequence
  primer
cggagagacaaactagactagaacacaa

SEQ ID NO: 114825 - DNA, 21 bp, Artificial Sequence
  primer
ccaaggagcctctcacttaca

SEQ ID NO: 114826 - DNA, 21 bp, Artificial Sequence
  primer
tgaccaggaaggaaacaggac

SEQ ID NO: 114827 - DNA, 21 bp, Artificial Sequence
  primer
cacaagcagaaatcatgcaaa

SEQ ID NO: 114828 - DNA, 28 bp, Artificial Sequence
  primer
ctggttcatttgtttactacagtgtcta

SEQ ID NO: 114829 - DNA, 20 bp, Artificial Sequence
  primer
acttggtaggctgaggtggg

SEQ ID NO: 114830 - DNA, 25 bp, Artificial Sequence
  primer
agcatgctgaagtttcctttattac

SEQ ID NO: 114831 - DNA, 38 bp, Artificial Sequence
  primer
gtaaaacgacggccagtgccttctagctcttccagtgc

SEQ ID NO: 114832 - DNA, 23 bp, Artificial Sequence
  primer
gcttgtaccactctgagacaaca

SEQ ID NO: 114833 - DNA, 22 bp, Artificial Sequence
  primer
atcctcctgataacatcttgcc

SEQ ID NO: 114834 - DNA, 23 bp, Artificial Sequence
  primer
catttcaaggagtttgaatggaa

SEQ ID NO: 114835 - DNA, 38 bp, Artificial Sequence
  primer
gtaaaacgacggccagtaagaagtgggattatttcccg

SEQ ID NO: 114836 - DNA, 25 bp, Artificial Sequence
  primer
ttgaatgacaaatttctacctttcc

SEQ ID NO: 114837 - DNA, 38 bp, Artificial Sequence
  primer
gtaaaacgacggccagtgccaaagcactaacctgcaac

SEQ ID NO: 114838 - DNA, 21 bp, Artificial Sequence
  primer
cacacatccatgatcaccagg

SEQ ID NO: 114839 - DNA, 25 bp, Artificial Sequence
  primer
gctgttgggaactactctcctattc

SEQ ID NO: 114840 - DNA, 21 bp, Artificial Sequence
  primer
ccacctatagcgtgagctttg

SEQ ID NO: 114841 - DNA, 19 bp, Artificial Sequence
  primer
aagcctgttcagtgctggc

SEQ ID NO: 114842 - DNA, 21 bp, Artificial Sequence
  primer
gctcctcaagggcaagaatta

SEQ ID NO: 114843 - DNA, 35 bp, Artificial Sequence
  primer
gtaaaacgacggccagttggtgatttgtgcctggg

SEQ ID NO: 114844 - DNA, 38 bp, Artificial Sequence
  primer
gtaaaacgacggccagtttctctctctttccacctggc

SEQ ID NO: 114845 - DNA, 22 bp, Artificial Sequence
  primer
ggagcaatggttcagtatttgc

SEQ ID NO: 114846 - DNA, 21 bp, Artificial Sequence
  primer
aagtttagctgcatttgctca

SEQ ID NO: 114847 - DNA, 42 bp, Artificial Sequence
  primer
gtaaaacgacggccagtaagggaaagcaaagtaaagcataag

SEQ ID NO: 114848 - DNA, 21 bp, Artificial Sequence
  primer
actccaccaaagatcctcaaa

SEQ ID NO: 114849 - DNA, 42 bp, Artificial Sequence
  primer
gtaaaacgacggccagtggctaacacttctaaacacgattcc

SEQ ID NO: 114850 - DNA, 37 bp, Artificial Sequence
  primer
gtaaaacgacggccagtaagcgatccttccacctcag

SEQ ID NO: 114851 - DNA, 21 bp, Artificial Sequence
  primer
taggcttccaaattcccttcc

SEQ ID NO: 114852 - DNA, 38 bp, Artificial Sequence
  primer
gtaaaacgacggccagtcaggagtctaacacaggcagc

SEQ ID NO: 114853 - DNA, 40 bp, Artificial Sequence
  primer
gtaaaacgacggccagtcaggaacaataattctcaatggc

SEQ ID NO: 114854 - DNA, 39 bp, Artificial Sequence
  primer
gtaaaacgacggccagttgtttggtcaatgtgaaagagg

SEQ ID NO: 114855 - DNA, 21 bp, Artificial Sequence
  primer
caaacatatgacatggctggg

SEQ ID NO: 114856 - DNA, 21 bp, Artificial Sequence
  primer
cttggcatgagacaatgatgg

SEQ ID NO: 114857 - DNA, 38 bp, Artificial Sequence
  primer
gtaaaacgacggccagtaaagaattggctcgttgttgg

SEQ ID NO: 114858 - DNA, 23 bp, Artificial Sequence
  primer
caaataaaccactgtagcatccc

SEQ ID NO: 114859 - DNA, 21 bp, Artificial Sequence
  primer
aatgccatgaagcataactgc

SEQ ID NO: 114860 - DNA, 23 bp, Artificial Sequence
  primer
ttcaaaggcaacgaaacttagac

SEQ ID NO: 114861 - DNA, 18 bp, Artificial Sequence
  primer
gtgtgagccactgtgccc

SEQ ID NO: 114862 - DNA, 21 bp, Artificial Sequence
  primer
ttgaaggcatgaaagtccttg

SEQ ID NO: 114863 - DNA, 39 bp, Artificial Sequence
  primer
gtaaaacgacggccagtgggtctggaattcagtacctgc

SEQ ID NO: 114864 - DNA, 20 bp, Artificial Sequence
  primer
attggttgcagaactgcctg

SEQ ID NO: 114865 - DNA, 43 bp, Artificial Sequence
  primer
gtaaaacgacggccagtggtgttcatttaactacagttcttgc

SEQ ID NO: 114866 - DNA, 25 bp, Artificial Sequence
  primer
tttccaatttgttaaatagtgaggg

SEQ ID NO: 114867 - DNA, 23 bp, Artificial Sequence
  primer
aatgcctgcacgttatgtttaag

SEQ ID NO: 114868 - DNA, 21 bp, Artificial Sequence
  primer
gggttcctgtcattatccctg

SEQ ID NO: 114869 - DNA, 40 bp, Artificial Sequence
  primer
gtaaaacgacggccagtaaagaatatcaatggcccagaac

SEQ ID NO: 114870 - DNA, 23 bp, Artificial Sequence
  primer
catcagagacgagaaataggcag

SEQ ID NO: 114871 - DNA, 23 bp, Artificial Sequence
  primer
tgcagtctgttgttgactgaaac

SEQ ID NO: 114872 - DNA, 39 bp, Artificial Sequence
  primer
gtaaaacgacggccagtgcaacgtacctattcctcaggg

SEQ ID NO: 114873 - DNA, 23 bp, Artificial Sequence
  primer
ggagtcaattgcatcatttagca

SEQ ID NO: 114874 - DNA, 21 bp, Artificial Sequence
  primer
ccaagctgtagtgtcctctgc

SEQ ID NO: 114875 - DNA, 22 bp, Artificial Sequence
  primer
tggccttattggtcatcatttc

SEQ ID NO: 114876 - DNA, 38 bp, Artificial Sequence
  primer
gtaaaacgacggccagtgagggcaattagtccaacctc

SEQ ID NO: 114877 - DNA, 22 bp, Artificial Sequence
  primer
ttagtgcagaatccatccaatg

SEQ ID NO: 114878 - DNA, 40 bp, Artificial Sequence
  primer
gtaaaacgacggccagtcaagccttgaccatatgtctttg

SEQ ID NO: 114879 - DNA, 38 bp, Artificial Sequence
  primer
gtaaaacgacggccagtcccaagtcaaaggtgtcttcc

SEQ ID NO: 114880 - DNA, 39 bp, Artificial Sequence
  primer
gtaaaacgacggccagtcaggatgacaggctccaaatac

SEQ ID NO: 114881 - DNA, 37 bp, Artificial Sequence
  primer
gtaaaacgacggccagtgcccagggctgtagaatgag

SEQ ID NO: 114882 - DNA, 21 bp, Artificial Sequence
  primer
tcaggtcaaccacctgctaag

SEQ ID NO: 114883 - DNA, 22 bp, Artificial Sequence
  primer
tggacacgatattgatggacag

SEQ ID NO: 114884 - DNA, 38 bp, Artificial Sequence
  primer
gtaaaacgacggccagtagcatctacccagcatgacag

SEQ ID NO: 114885 - DNA, 22 bp, Artificial Sequence
  primer
gcaatatcatacggatcaaccc

SEQ ID NO: 114886 - DNA, 23 bp, Artificial Sequence
  primer
tctacccattaacacatgctttg

SEQ ID NO: 114887 - DNA, 42 bp, Artificial Sequence
  primer
gtaaaacgacggccagtcagcttgcaagtttaactctcataa

SEQ ID NO: 114888 - DNA, 21 bp, Artificial Sequence
  primer
attcctttgcaacttcctgtg

SEQ ID NO: 114889 - DNA, 21 bp, Artificial Sequence
  primer
agcacagtggtagctttgcac

SEQ ID NO: 114890 - DNA, 21 bp, Artificial Sequence
  primer
ctaggaccaccacatccttcc

SEQ ID NO: 114891 - DNA, 21 bp, Artificial Sequence
  primer
gcatccacaggaccatctaaa

SEQ ID NO: 114892 - DNA, 38 bp, Artificial Sequence
  primer
gtaaaacgacggccagtatgcctgcaacaaagaaacag

SEQ ID NO: 114893 - DNA, 22 bp, Artificial Sequence
  primer
tcagatggctgtaaactgcaac

SEQ ID NO: 114894 - DNA, 38 bp, Artificial Sequence
  primer
gtaaaacgacggccagttatcagtttcgggcacaattc

SEQ ID NO: 114895 - DNA, 44 bp, Artificial Sequence
  primer
gtaaaacgacggccagttcttatgattctatgggctagtcttct

SEQ ID NO: 114896 - DNA, 20 bp, Artificial Sequence
  primer
gccaagtgcagcatgatttc

SEQ ID NO: 114897 - DNA, 27 bp, Artificial Sequence
  primer
catagggatttaagaaaggagaaactc

SEQ ID NO: 114898 - DNA, 24 bp, Artificial Sequence
  primer
gctctccatttcacatacctaacc

SEQ ID NO: 114899 - DNA, 21 bp, Artificial Sequence
  primer
cttaatgagccacgaggtgtg

SEQ ID NO: 114900 - DNA, 19 bp, Artificial Sequence
  primer
cagctgagatcgcaccatt

SEQ ID NO: 114901 - DNA, 21 bp, Artificial Sequence
  primer
catggtaggactctggtgcag

SEQ ID NO: 114902 - DNA, 44 bp, Artificial Sequence
  primer
gtaaaacgacggccagtccaacctatgtacagtcttctatacgg

SEQ ID NO: 114903 - DNA, 25 bp, Artificial Sequence
  primer
gaaatacaggaaactgttgtgcttc

SEQ ID NO: 114904 - DNA, 38 bp, Artificial Sequence
  primer
gtaaaacgacggccagtgagatgggcagcattcatttc

SEQ ID NO: 114905 - DNA, 21 bp, Artificial Sequence
  primer
tggtcaatggagattgtgtgg

SEQ ID NO: 114906 - DNA, 22 bp, Artificial Sequence
  primer
tggatgttacaatgcattcctc

SEQ ID NO: 114907 - DNA, 20 bp, Artificial Sequence
  primer
aaataccctcaaggccatcc

SEQ ID NO: 114908 - DNA, 38 bp, Artificial Sequence
  primer
gtaaaacgacggccagtcatgggtttataccctgcttg

SEQ ID NO: 114909 - DNA, 25 bp, Artificial Sequence
  primer
ttaattgacacatttgtttccagac

SEQ ID NO: 114910 - DNA, 40 bp, Artificial Sequence
  primer
gtaaaacgacggccagtggtctatattgagtgtcctgggc

SEQ ID NO: 114911 - DNA, 26 bp, Artificial Sequence
  primer
cctttattggtctaaactacgcattg

SEQ ID NO: 114912 - DNA, 21 bp, Artificial Sequence
  primer
acaaccatttgcctgatttcc

SEQ ID NO: 114913 - DNA, 39 bp, Artificial Sequence
  primer
gtaaaacgacggccagttgaacacatggaaatggacttt

SEQ ID NO: 114914 - DNA, 37 bp, Artificial Sequence
  primer
gtaaaacgacggccagtcagccgggtttctcagtaag

SEQ ID NO: 114915 - DNA, 41 bp, Artificial Sequence
  primer
gtaaaacgacggccagttggagatgacaactttatgactgc

SEQ ID NO: 114916 - DNA, 22 bp, Artificial Sequence
  primer
ggaaattgcatttgctgctatg

SEQ ID NO: 114917 - DNA, 22 bp, Artificial Sequence
  primer
tcttgacaggaattaaggctgc

SEQ ID NO: 114918 - DNA, 38 bp, Artificial Sequence
  primer
gtaaaacgacggccagtagatggaaattgccttgcttg

SEQ ID NO: 114919 - DNA, 38 bp, Artificial Sequence
  primer
gtaaaacgacggccagtgggcatttaggttgattccat

SEQ ID NO: 114920 - DNA, 24 bp, Artificial Sequence
  primer
cgttagaacatcatttccctactg

SEQ ID NO: 114921 - DNA, 21 bp, Artificial Sequence
  primer
cacagagcctcaaatccaaac

SEQ ID NO: 114922 - DNA, 40 bp, Artificial Sequence
  primer
gtaaaacgacggccagtttgtcaaggaactgaagaactgc

SEQ ID NO: 114923 - DNA, 24 bp, Artificial Sequence
  primer
ccctcactttaggaggtatgaaag

SEQ ID NO: 114924 - DNA, 37 bp, Artificial Sequence
  primer
gtaaaacgacggccagtaaccaggattgagcatcacg

SEQ ID NO: 114925 - DNA, 38 bp, Artificial Sequence
  primer
gtaaaacgacggccagtcctgttgtgttcccatctttc

SEQ ID NO: 114926 - DNA, 36 bp, Artificial Sequence
  primer
gtaaaacgacggccagtaccctcctggaagcctctc

SEQ ID NO: 114927 - DNA, 22 bp, Artificial Sequence
  primer
cctgattacagcaacaagtccc

SEQ ID NO: 114928 - DNA, 22 bp, Artificial Sequence
  primer
ttcttggctaattctttgcagc

SEQ ID NO: 114929 - DNA, 38 bp, Artificial Sequence
  primer
gtaaaacgacggccagtaatgaaatgcaccatctttgc

SEQ ID NO: 114930 - DNA, 40 bp, Artificial Sequence
  primer
gtaaaacgacggccagttcaccaacaggtagatttcttgc

SEQ ID NO: 114931 - DNA, 21 bp, Artificial Sequence
  primer
agtgtggacgaatcccaagac

SEQ ID NO: 114932 - DNA, 21 bp, Artificial Sequence
  primer
ctttgaatggctatgtgcagc

SEQ ID NO: 114933 - DNA, 39 bp, Artificial Sequence
  primer
gtaaaacgacggccagtaaccaaggcactcatagctcag

SEQ ID NO: 114934 - DNA, 39 bp, Artificial Sequence
  primer
gtaaaacgacggccagtcacacacatcactgagtccctc

SEQ ID NO: 114935 - DNA, 18 bp, Artificial Sequence
  primer
gagtcgcagtcgtcggtc

SEQ ID NO: 114936 - DNA, 21 bp, Artificial Sequence
  primer
ctatcactccgcctcttggac

SEQ ID NO: 114937 - DNA, 38 bp, Artificial Sequence
  primer
gtaaaacgacggccagtcgaggagatgtgcagagtcag

SEQ ID NO: 114938 - DNA, 21 bp, Artificial Sequence
  primer
aagaataggctcaatggtggc

SEQ ID NO: 114939 - DNA, 21 bp, Artificial Sequence
  primer
catgctagtttgtgtcgggtc

SEQ ID NO: 114940 - DNA, 21 bp, Artificial Sequence
  primer
aaggaagacaggatggctcag

SEQ ID NO: 114941 - DNA, 21 bp, Artificial Sequence
  primer
ggctatgaggttgtgttgtgc

SEQ ID NO: 114942 - DNA, 38 bp, Artificial Sequence
  primer
gtaaaacgacggccagtagccaaaggaaatacacaggg

SEQ ID NO: 114943 - DNA, 39 bp, Artificial Sequence
  primer
gtaaaacgacggccagtcccaattctgcacactttcttg

SEQ ID NO: 114944 - DNA, 38 bp, Artificial Sequence
  primer
gtaaaacgacggccagttttcaagcaagaaggttgtgc

SEQ ID NO: 114945 - DNA, 21 bp, Artificial Sequence
  primer
tcgttaagcaggttgcatttc

SEQ ID NO: 114946 - DNA, 21 bp, Artificial Sequence
  primer
ataccctgtgtgtgtgcaacc

SEQ ID NO: 114947 - DNA, 21 bp, Artificial Sequence
  primer
cacttgaacccaggaggtagg

SEQ ID NO: 114948 - DNA, 38 bp, Artificial Sequence
  primer
gtaaaacgacggccagtccagggaataattggaggttc

SEQ ID NO: 114949 - DNA, 22 bp, Artificial Sequence
  primer
tcggaagacactgcacttactg

SEQ ID NO: 114950 - DNA, 43 bp, Artificial Sequence
  primer
gtaaaacgacggccagtttgtctttgaacaatttagaagttcg

SEQ ID NO: 114951 - DNA, 21 bp, Artificial Sequence
  primer
gttacaccagtgtgtggcagg

SEQ ID NO: 114952 - DNA, 21 bp, Artificial Sequence
  primer
tacctgtgagtgacgtggtcc

SEQ ID NO: 114953 - DNA, 21 bp, Artificial Sequence
  primer
ttaaccacgtgcctttcacac

SEQ ID NO: 114954 - DNA, 18 bp, Artificial Sequence
  primer
gcagctccaagccctgtt

SEQ ID NO: 114955 - DNA, 21 bp, Artificial Sequence
  primer
tccacattagcaccacgtttc

SEQ ID NO: 114956 - DNA, 38 bp, Artificial Sequence
  primer
gtaaaacgacggccagtcggacctcatcctcatagtgg

SEQ ID NO: 114957 - DNA, 20 bp, Artificial Sequence
  primer
aggtgagtccatgttcgctg

SEQ ID NO: 114958 - DNA, 38 bp, Artificial Sequence
  primer
gtaaaacgacggccagtctagacaatgcaggaactggg

SEQ ID NO: 114959 - DNA, 21 bp, Artificial Sequence
  primer
cacccatactcacttctgccc

SEQ ID NO: 114960 - DNA, 38 bp, Artificial Sequence
  primer
gtaaaacgacggccagtagagagaagaggcatgatggg

SEQ ID NO: 114961 - DNA, 21 bp, Artificial Sequence
  primer
gccctcctagagttgatgctg

SEQ ID NO: 114962 - DNA, 21 bp, Artificial Sequence
  primer
gcagccagcctgatatctacc

SEQ ID NO: 114963 - DNA, 21 bp, Artificial Sequence
  primer
taggagcagccactgtgatcc

SEQ ID NO: 114964 - DNA, 38 bp, Artificial Sequence
  primer
gtaaaacgacggccagtactttgaccctagatgcccac

SEQ ID NO: 114965 - DNA, 21 bp, Artificial Sequence
  primer
tcttagccttgatttggtgcc

SEQ ID NO: 114966 - DNA, 19 bp, Artificial Sequence
  primer
gggcatgaaatgacaaggg

SEQ ID NO: 114967 - DNA, 19 bp, Artificial Sequence
  primer
gaccgcaaatgcaggctac

SEQ ID NO: 114968 - DNA, 21 bp, Artificial Sequence
  primer
aggtttcgacatgcttatggg

SEQ ID NO: 114969 - DNA, 39 bp, Artificial Sequence
  primer
gtaaaacgacggccagtccctttggattatggatgaagg

SEQ ID NO: 114970 - DNA, 21 bp, Artificial Sequence
  primer
tgtttgcttctgcaattcacc

SEQ ID NO: 114971 - DNA, 37 bp, Artificial Sequence
  primer
gtaaaacgacggccagtaagtatgcctgccacactgg

SEQ ID NO: 114972 - DNA, 21 bp, Artificial Sequence
  primer
ctcccatgtggagattccttc

SEQ ID NO: 114973 - DNA, 21 bp, Artificial Sequence
  primer
acaggacagaacatcagcagg

SEQ ID NO: 114974 - DNA, 38 bp, Artificial Sequence
  primer
gtaaaacgacggccagtgctgctttcaagtccattctg

SEQ ID NO: 114975 - DNA, 39 bp, Artificial Sequence
  primer
gtaaaacgacggccagtttcctagcaaggacaaatgctc

SEQ ID NO: 114976 - DNA, 38 bp, Artificial Sequence
  primer
gtaaaacgacggccagtgaactcaagtcaggcaggcac

SEQ ID NO: 114977 - DNA, 38 bp, Artificial Sequence
  primer
gtaaaacgacggccagtcagagctatgctgaggtttgc

SEQ ID NO: 114978 - DNA, 20 bp, Artificial Sequence
  primer
cattctgagaggctgcatgg

SEQ ID NO: 114979 - DNA, 21 bp, Artificial Sequence
  primer
tatgaacagtggctttgcctg

SEQ ID NO: 114980 - DNA, 21 bp, Artificial Sequence
  primer
ggcctttctccattaaacagc

SEQ ID NO: 114981 - DNA, 21 bp, Artificial Sequence
  primer
tcaaatagccgaatgagaccc

SEQ ID NO: 114982 - DNA, 21 bp, Artificial Sequence
  primer
caccagcccagaacctaagac

SEQ ID NO: 114983 - DNA, 21 bp, Artificial Sequence
  primer
tggacgaaatcttcacctttg

SEQ ID NO: 114984 - DNA, 38 bp, Artificial Sequence
  primer
gtaaaacgacggccagttcaataaggacagttgtgccc

SEQ ID NO: 114985 - DNA, 21 bp, Artificial Sequence
  primer
attcctccaccatgtggaaac

SEQ ID NO: 114986 - DNA, 37 bp, Artificial Sequence
  primer
gtaaaacgacggccagtcagttcactggaaagggctg

SEQ ID NO: 114987 - DNA, 21 bp, Artificial Sequence
  primer
cattgtccttgcatctcttgg

SEQ ID NO: 114988 - DNA, 21 bp, Artificial Sequence
  primer
gccacaaactcaggattgaac

SEQ ID NO: 114989 - DNA, 38 bp, Artificial Sequence
  primer
gtaaaacgacggccagttggtccagtggaattgtcttg

SEQ ID NO: 114990 - DNA, 21 bp, Artificial Sequence
  primer
tcaattcctgcatttcagcac

SEQ ID NO: 114991 - DNA, 38 bp, Artificial Sequence
  primer
gtaaaacgacggccagtatgcgaattatgaccgtgatg

SEQ ID NO: 114992 - DNA, 21 bp, Artificial Sequence
  primer
gaagcctgatggagagaccag

SEQ ID NO: 114993 - DNA, 21 bp, Artificial Sequence
  primer
aaagaaaggtggatgtgctgc

SEQ ID NO: 114994 - DNA, 36 bp, Artificial Sequence
  primer
gtaaaacgacggccagtcctctgcaacctctcccag

SEQ ID NO: 114995 - DNA, 26 bp, Artificial Sequence
  primer
tccagaaggtgggaactacataatac

SEQ ID NO: 114996 - DNA, 21 bp, Artificial Sequence
  primer
atagctcctctcctggctttg

SEQ ID NO: 114997 - DNA, 38 bp, Artificial Sequence
  primer
gtaaaacgacggccagtgtctggacatgctgtggaaag

SEQ ID NO: 114998 - DNA, 21 bp, Artificial Sequence
  primer
tccatgcttgaactccaacag

SEQ ID NO: 114999 - DNA, 20 bp, Artificial Sequence
  primer
cacatggctttggagctcag

SEQ ID NO: 115000 - DNA, 38 bp, Artificial Sequence
  primer
gtaaaacgacggccagtcagcaatgaccctgacttctg

SEQ ID NO: 115001 - DNA, 22 bp, Artificial Sequence
  primer
gggagaagctaagagtggatgg

SEQ ID NO: 115002 - DNA, 36 bp, Artificial Sequence
  primer
gtaaaacgacggccagtcacccgactcccttctgag

SEQ ID NO: 115003 - DNA, 36 bp, Artificial Sequence
  primer
gtaaaacgacggccagtatctgcatcacgagggagc

SEQ ID NO: 115004 - DNA, 38 bp, Artificial Sequence
  primer
gtaaaacgacggccagtaggaccagatttgacatgagc

SEQ ID NO: 115005 - DNA, 21 bp, Artificial Sequence
  primer
agcaggagaaaggtgtgcatc

SEQ ID NO: 115006 - DNA, 20 bp, Artificial Sequence
  primer
atgctgcaggacaactgctc

SEQ ID NO: 115007 - DNA, 38 bp, Artificial Sequence
  primer
gtaaaacgacggccagttgaagaggccatggatgtagg

SEQ ID NO: 115008 - DNA, 38 bp, Artificial Sequence
  primer
gtaaaacgacggccagttgatggcctcaaggaaagaag

SEQ ID NO: 115009 - DNA, 21 bp, Artificial Sequence
  primer
ccttaggcacacctctccaag

SEQ ID NO: 115010 - DNA, 21 bp, Artificial Sequence
  primer
atagctcctctcctggctttg

SEQ ID NO: 115011 - DNA, 38 bp, Artificial Sequence
  primer
gtaaaacgacggccagtagcacttaccagaggtcacgg

SEQ ID NO: 115012 - DNA, 26 bp, Artificial Sequence
  primer
attataaggtggtaggtttaagggtg

SEQ ID NO: 115013 - DNA, 21 bp, Artificial Sequence
  primer
atcagcagacatctcacaccc

SEQ ID NO: 115014 - DNA, 38 bp, Artificial Sequence
  primer
gtaaaacgacggccagtgcaagactgcaagggagattc

SEQ ID NO: 115015 - DNA, 38 bp, Artificial Sequence
  primer
gtaaaacgacggccagtcggcctggagtttatgttagc

SEQ ID NO: 115016 - DNA, 21 bp, Artificial Sequence
  primer
tcctcctttcccaagttaccc

SEQ ID NO: 115017 - DNA, 21 bp, Artificial Sequence
  primer
acatgctctcagctctccttg

SEQ ID NO: 115018 - DNA, 38 bp, Artificial Sequence
  primer
gtaaaacgacggccagtgcaagtagatgaggagggcag

SEQ ID NO: 115019 - DNA, 21 bp, Artificial Sequence
  primer
acagccaggcttctgtctacc

SEQ ID NO: 115020 - DNA, 22 bp, Artificial Sequence
  primer
agtgacatccagaggacagagg

SEQ ID NO: 115021 - DNA, 37 bp, Artificial Sequence
  primer
gtaaaacgacggccagtctcaccacttgggagtcctg

SEQ ID NO: 115022 - DNA, 38 bp, Artificial Sequence
  primer
gtaaaacgacggccagtaattgccagtaggattgtggg

SEQ ID NO: 115023 - DNA, 18 bp, Artificial Sequence
  primer
tccctccctcctccagtg

SEQ ID NO: 115024 - DNA, 21 bp, Artificial Sequence
  primer
gtagccacagacagagggatg

SEQ ID NO: 115025 - DNA, 38 bp, Artificial Sequence
  primer
gtaaaacgacggccagtctacaatctcctgtcaggccc

SEQ ID NO: 115026 - DNA, 21 bp, Artificial Sequence
  primer
ttcctatcacccaagcaggtc

SEQ ID NO: 115027 - DNA, 38 bp, Artificial Sequence
  primer
gtaaaacgacggccagtgtagaagagtatggcgcccag

SEQ ID NO: 115028 - DNA, 21 bp, Artificial Sequence
  primer
tacacagtccttatgtcccgc

SEQ ID NO: 115029 - DNA, 21 bp, Artificial Sequence
  primer
cacatcagaaactgggtggtc

SEQ ID NO: 115030 - DNA, 38 bp, Artificial Sequence
  primer
gtaaaacgacggccagtaacaagaagggaagatgctgg

SEQ ID NO: 115031 - DNA, 38 bp, Artificial Sequence
  primer
gtaaaacgacggccagtaggacccacagaaccactcac

SEQ ID NO: 115032 - DNA, 37 bp, Artificial Sequence
  primer
gtaaaacgacggccagtagcattcacacgagcctcac

SEQ ID NO: 115033 - DNA, 38 bp, Artificial Sequence
  primer
gtaaaacgacggccagttcaagctcagagcacagacag

SEQ ID NO: 115034 - DNA, 38 bp, Artificial Sequence
  primer
gtaaaacgacggccagtgtgagtgtccttgacctcctg

SEQ ID NO: 115035 - DNA, 36 bp, Artificial Sequence
  primer
gtaaaacgacggccagtccagcctgggaaacaagag

SEQ ID NO: 115036 - DNA, 21 bp, Artificial Sequence
  primer
gggcaacaagagtgaaactcc

SEQ ID NO: 115037 - DNA, 21 bp, Artificial Sequence
  primer
tgatatcctagcaatggcctg

SEQ ID NO: 115038 - DNA, 37 bp, Artificial Sequence
  primer
gtaaaacgacggccagttttacatatggaggctcggg

SEQ ID NO: 115039 - DNA, 21 bp, Artificial Sequence
  primer
aacctttgtaggagcacacgc

SEQ ID NO: 115040 - DNA, 38 bp, Artificial Sequence
  primer
gtaaaacgacggccagtaatgtgcacctatgttctggg

SEQ ID NO: 115041 - DNA, 38 bp, Artificial Sequence
  primer
gtaaaacgacggccagtcaagcagaagcagaacccaag

SEQ ID NO: 115042 - DNA, 20 bp, Artificial Sequence
  primer
agtgctgctttaaggcggag

SEQ ID NO: 115043 - DNA, 39 bp, Artificial Sequence
  primer
gtaaaacgacggccagtaaaggccgagaagtgatcatag

SEQ ID NO: 115044 - DNA, 38 bp, Artificial Sequence
  primer
gtaaaacgacggccagtaggcaatttgtggtcagtttg

SEQ ID NO: 115045 - DNA, 37 bp, Artificial Sequence
  primer
gtaaaacgacggccagtcatatctgccctctcctccc

SEQ ID NO: 115046 - DNA, 27 bp, Artificial Sequence
  primer
aagctgctaagagttatttctgattga

SEQ ID NO: 115047 - DNA, 25 bp, Artificial Sequence
  primer
caacctcttatgatctgaacaatgg

SEQ ID NO: 115048 - DNA, 38 bp, Artificial Sequence
  primer
gtaaaacgacggccagtaacaatgggtttccctcagtg

SEQ ID NO: 115049 - DNA, 20 bp, Artificial Sequence
  primer
aggcatgagctacttgcacc

SEQ ID NO: 115050 - DNA, 45 bp, Artificial Sequence
  primer
gtaaaacgacggccagttgagcatattatgattacagtccttcac

SEQ ID NO: 115051 - DNA, 20 bp, Artificial Sequence
  primer
gcctggctgaagaagacatc

SEQ ID NO: 115052 - DNA, 21 bp, Artificial Sequence
  primer
caccgctcctcagaatggtag

SEQ ID NO: 115053 - DNA, 25 bp, Artificial Sequence
  primer
gctacagcgaaatagaaacattcag

SEQ ID NO: 115054 - DNA, 24 bp, Artificial Sequence
  primer
tttacgtggtacagacattcagtg

SEQ ID NO: 115055 - DNA, 21 bp, Artificial Sequence
  primer
gagcaatccacctctgtctcc

SEQ ID NO: 115056 - DNA, 21 bp, Artificial Sequence
  primer
agtgttcagtgttgctccagg

SEQ ID NO: 115057 - DNA, 21 bp, Artificial Sequence
  primer
tcgaactacacgaacacaccc

SEQ ID NO: 115058 - DNA, 38 bp, Artificial Sequence
  primer
gtaaaacgacggccagtcacgatcacaccactacaccc

SEQ ID NO: 115059 - DNA, 20 bp, Artificial Sequence
  primer
ccagctggattgctgagaac

SEQ ID NO: 115060 - DNA, 36 bp, Artificial Sequence
  primer
gtaaaacgacggccagtctgcagccgtagtcacagc

SEQ ID NO: 115061 - DNA, 37 bp, Artificial Sequence
  primer
gtaaaacgacggccagttcatatgggcacatacgctg

SEQ ID NO: 115062 - DNA, 38 bp, Artificial Sequence
  primer
gtaaaacgacggccagtgtatgacacaccaggctgtcc

SEQ ID NO: 115063 - DNA, 21 bp, Artificial Sequence
  primer
actccatttaagctgccttgc

SEQ ID NO: 115064 - DNA, 21 bp, Artificial Sequence
  primer
atcagggaaagaggagcacag

SEQ ID NO: 115065 - DNA, 20 bp, Artificial Sequence
  primer
ctcacactcagtgcagtggc

SEQ ID NO: 115066 - DNA, 21 bp, Artificial Sequence
  primer
attacatgggagcagcctcag

SEQ ID NO: 115067 - DNA, 20 bp, Artificial Sequence
  primer
gtccacactcaaggagcagc

SEQ ID NO: 115068 - DNA, 38 bp, Artificial Sequence
  primer
gtaaaacgacggccagttacagggagcagtaacctgcc

SEQ ID NO: 115069 - DNA, 21 bp, Artificial Sequence
  primer
ctgccctgaattgtccatacc

SEQ ID NO: 115070 - DNA, 20 bp, Artificial Sequence
  primer
ttaccacaccttggactggc

SEQ ID NO: 115071 - DNA, 36 bp, Artificial Sequence
  primer
gtaaaacgacggccagtgtcgccttcaatgctcctg

SEQ ID NO: 115072 - DNA, 37 bp, Artificial Sequence
  primer
gtaaaacgacggccagtaacaattctcccaccttggc

SEQ ID NO: 115073 - DNA, 39 bp, Artificial Sequence
  primer
gtaaaacgacggccagtgccacctgtttgtaatctctgc

SEQ ID NO: 115074 - DNA, 21 bp, Artificial Sequence
  primer
acagctcacttccctgacatc

SEQ ID NO: 115075 - DNA, 21 bp, Artificial Sequence
  primer
acacgtggcttgatcattacc

SEQ ID NO: 115076 - DNA, 21 bp, Artificial Sequence
  primer
ctcactttctgtcgaggaggg

SEQ ID NO: 115077 - DNA, 38 bp, Artificial Sequence
  primer
gtaaaacgacggccagtaaacacaaggccattaaagcg

SEQ ID NO: 115078 - DNA, 38 bp, Artificial Sequence
  primer
gtaaaacgacggccagtcttaagcccaggagtttgagg

SEQ ID NO: 115079 - DNA, 41 bp, Artificial Sequence
  primer
gtaaaacgacggccagtgaacatgtaaggtacctctggtgc

SEQ ID NO: 115080 - DNA, 22 bp, Artificial Sequence
  primer
ctagctcagccgactacctttg

SEQ ID NO: 115081 - DNA, 37 bp, Artificial Sequence
  primer
gtaaaacgacggccagtatgactgtgccactgcactc

SEQ ID NO: 115082 - DNA, 22 bp, Artificial Sequence
  primer
ggcaacagagtgattctccatc

SEQ ID NO: 115083 - DNA, 41 bp, Artificial Sequence
  primer
gtaaaacgacggccagtaaattcagctaattcataccaggg

SEQ ID NO: 115084 - DNA, 23 bp, Artificial Sequence
  primer
ccaaatgataagcaatgagcaac

SEQ ID NO: 115085 - DNA, 21 bp, Artificial Sequence
  primer
acctggtcagtcatgggaaag

SEQ ID NO: 115086 - DNA, 21 bp, Artificial Sequence
  primer
gcatttccaatgtgcttcttt

SEQ ID NO: 115087 - DNA, 22 bp, Artificial Sequence
  primer
tcaagtcaattcagatggcaaa

SEQ ID NO: 115088 - DNA, 18 bp, Artificial Sequence
  primer
caaggctcctcctcccac

SEQ ID NO: 115089 - DNA, 38 bp, Artificial Sequence
  primer
gtaaaacgacggccagtcccttcttcacttcgatggtc

SEQ ID NO: 115090 - DNA, 20 bp, Artificial Sequence
  primer
ccatcgccctctacagacac

SEQ ID NO: 115091 - DNA, 37 bp, Artificial Sequence
  primer
gtaaaacgacggccagttcctgttcactgttgtgccc

SEQ ID NO: 115092 - DNA, 39 bp, Artificial Sequence
  primer
gtaaaacgacggccagttccacaactggtagaaaggtcc

SEQ ID NO: 115093 - DNA, 37 bp, Artificial Sequence
  primer
gtaaaacgacggccagtactccgtcagtctggcaatg

SEQ ID NO: 115094 - DNA, 23 bp, Artificial Sequence
  primer
gagctgaaaggagtgtttctctg

SEQ ID NO: 115095 - DNA, 21 bp, Artificial Sequence
  primer
gccatcagtctttcctgaagc

SEQ ID NO: 115096 - DNA, 41 bp, Artificial Sequence
  primer
gtaaaacgacggccagttgatcactctctcttaccctcaaa

SEQ ID NO: 115097 - DNA, 36 bp, Artificial Sequence
  primer
gtaaaacgacggccagtttgcagaacatggcagtgg

SEQ ID NO: 115098 - DNA, 23 bp, Artificial Sequence
  primer
cattaagatggagtaaggcaggg

SEQ ID NO: 115099 - DNA, 35 bp, Artificial Sequence
  primer
gtaaaacgacggccagtaatcctagggcccaaccc

SEQ ID NO: 115100 - DNA, 21 bp, Artificial Sequence
  primer
cgaccaagaaaggagtccatc

SEQ ID NO: 115101 - DNA, 26 bp, Artificial Sequence
  primer
tgattctgtttcactcccatatactc

SEQ ID NO: 115102 - DNA, 23 bp, Artificial Sequence
  primer
gcaaatggacaaattcttaagcc

SEQ ID NO: 115103 - DNA, 18 bp, Artificial Sequence
  primer
ctcagtgcgcaggcgtag

SEQ ID NO: 115104 - DNA, 37 bp, Artificial Sequence
  primer
gtaaaacgacggccagtggaggacatgctccaggaag

SEQ ID NO: 115105 - DNA, 37 bp, Artificial Sequence
  primer
gtaaaacgacggccagtcttggtcccttactccctgc

SEQ ID NO: 115106 - DNA, 37 bp, Artificial Sequence
  primer
gtaaaacgacggccagtgtcaggagccaggtctgttg

SEQ ID NO: 115107 - DNA, 21 bp, Artificial Sequence
  primer
ctggtcccagaatggacagtg

SEQ ID NO: 115108 - DNA, 20 bp, Artificial Sequence
  primer
acactggctggatcaggatg

SEQ ID NO: 115109 - DNA, 21 bp, Artificial Sequence
  primer
gtgagcagggctctctccttc

SEQ ID NO: 115110 - DNA, 20 bp, Artificial Sequence
  primer
acaatcaccaggcttcctcc

SEQ ID NO: 115111 - DNA, 21 bp, Artificial Sequence
  primer
gcagctcccagaggaactaac

SEQ ID NO: 115112 - DNA, 38 bp, Artificial Sequence
  primer
gtaaaacgacggccagtggcacagaggaaactaggtgg

SEQ ID NO: 115113 - DNA, 21 bp, Artificial Sequence
  primer
agcctccattgcaagaatctg

SEQ ID NO: 115114 - DNA, 38 bp, Artificial Sequence
  primer
gtaaaacgacggccagtaatcttctgtccgtggcattc

SEQ ID NO: 115115 - DNA, 21 bp, Artificial Sequence
  primer
gaggaggagaaatctggcatc

SEQ ID NO: 115116 - DNA, 20 bp, Artificial Sequence
  primer
ccctcaaggagccaactttc

SEQ ID NO: 115117 - DNA, 21 bp, Artificial Sequence
  primer
tgccatctctgatcctaccag

SEQ ID NO: 115118 - DNA, 20 bp, Artificial Sequence
  primer
ctgcctccatctctgacagg

SEQ ID NO: 115119 - DNA, 37 bp, Artificial Sequence
  primer
gtaaaacgacggccagtggagcttggagttggaaagc

SEQ ID NO: 115120 - DNA, 23 bp, Artificial Sequence
  primer
ccttaacaagctgagagagaggg

SEQ ID NO: 115121 - DNA, 41 bp, Artificial Sequence
  primer
gtaaaacgacggccagtaaatcttcatccgtttggtacaac

SEQ ID NO: 115122 - DNA, 39 bp, Artificial Sequence
  primer
gtaaaacgacggccagtggtcctaccaacttacctctcg

SEQ ID NO: 115123 - DNA, 40 bp, Artificial Sequence
  primer
gtaaaacgacggccagtccaatgcagatctcataaaccac

SEQ ID NO: 115124 - DNA, 39 bp, Artificial Sequence
  primer
gtaaaacgacggccagtcatgcaatttaatgaaccctca

SEQ ID NO: 115125 - DNA, 21 bp, Artificial Sequence
  primer
ctcttctctgggtgacagtgc

SEQ ID NO: 115126 - DNA, 38 bp, Artificial Sequence
  primer
gtaaaacgacggccagtgccacgcttgatgactatgtg

SEQ ID NO: 115127 - DNA, 38 bp, Artificial Sequence
  primer
gtaaaacgacggccagtgcactgtagagcacgttggtg

SEQ ID NO: 115128 - DNA, 39 bp, Artificial Sequence
  primer
gtaaaacgacggccagtggtaaggtgagtgggaaggaag

SEQ ID NO: 115129 - DNA, 36 bp, Artificial Sequence
  primer
gtaaaacgacggccagtcagtggacatcaagctggg

SEQ ID NO: 115130 - DNA, 21 bp, Artificial Sequence
  primer
aggcctagactgcaaatgctc

SEQ ID NO: 115131 - DNA, 20 bp, Artificial Sequence
  primer
ctgaggaggatcccaacacc

SEQ ID NO: 115132 - DNA, 27 bp, Artificial Sequence
  primer
ctttctacgttgcatctctatttactg

SEQ ID NO: 115133 - DNA, 21 bp, Artificial Sequence
  primer
ctcccaaagtgctgggattac

SEQ ID NO: 115134 - DNA, 39 bp, Artificial Sequence
  primer
gtaaaacgacggccagtaagcgcagacctgtataccaaa

SEQ ID NO: 115135 - DNA, 21 bp, Artificial Sequence
  primer
acactctgggagacgtgcaac

SEQ ID NO: 115136 - DNA, 39 bp, Artificial Sequence
  primer
gtaaaacgacggccagtcctgttaatcctcaaatggtgc

SEQ ID NO: 115137 - DNA, 37 bp, Artificial Sequence
  primer
gtaaaacgacggccagttttgtgtcctcgctgtcctc

SEQ ID NO: 115138 - DNA, 21 bp, Artificial Sequence
  primer
atccgtgatcgcataatcctg

SEQ ID NO: 115139 - DNA, 38 bp, Artificial Sequence
  primer
gtaaaacgacggccagtagaagtaaggccttcatgccc

SEQ ID NO: 115140 - DNA, 21 bp, Artificial Sequence
  primer
ccctctttgactcctgctgag

SEQ ID NO: 115141 - DNA, 21 bp, Artificial Sequence
  primer
accaaatgtccacaatcctgc

SEQ ID NO: 115142 - DNA, 21 bp, Artificial Sequence
  primer
cactattgaatgggctgtccc

SEQ ID NO: 115143 - DNA, 21 bp, Artificial Sequence
  primer
atccatttgagctgctccttg

SEQ ID NO: 115144 - DNA, 37 bp, Artificial Sequence
  primer
gtaaaacgacggccagtaccatcaggctatgtctgcg

SEQ ID NO: 115145 - DNA, 37 bp, Artificial Sequence
  primer
gtaaaacgacggccagtactccacctcccatctccac

SEQ ID NO: 115146 - DNA, 21 bp, Artificial Sequence
  primer
ttcgttgagtgacagtcctgc

SEQ ID NO: 115147 - DNA, 43 bp, Artificial Sequence
  primer
gtaaaacgacggccagttctactcgttgaatgttgaatttgtc

SEQ ID NO: 115148 - DNA, 18 bp, Artificial Sequence
  primer
cgtgtccggctgtctctg

SEQ ID NO: 115149 - DNA, 22 bp, Artificial Sequence
  primer
ccctccaagaatttagagatgc

SEQ ID NO: 115150 - DNA, 23 bp, Artificial Sequence
  primer
cccggacttgctaacattatgac

SEQ ID NO: 115151 - DNA, 43 bp, Artificial Sequence
  primer
gtaaaacgacggccagttgggttcttcttgacttagaaatatg

SEQ ID NO: 115152 - DNA, 42 bp, Artificial Sequence
  primer
gtaaaacgacggccagtgaacttgtctcataaacaatggcac

SEQ ID NO: 115153 - DNA, 37 bp, Artificial Sequence
  primer
gtaaaacgacggccagtattcagagagccgacatggg

SEQ ID NO: 115154 - DNA, 26 bp, Artificial Sequence
  primer
ggatgttccatgtcaaatacattaag

SEQ ID NO: 115155 - DNA, 41 bp, Artificial Sequence
  primer
gtaaaacgacggccagtaagcactatatcgtgagctaaccc

SEQ ID NO: 115156 - DNA, 21 bp, Artificial Sequence
  primer
cccaaagatactgtggaaccc

SEQ ID NO: 115157 - DNA, 21 bp, Artificial Sequence
  primer
tcttctcggcaccagtatgtg

SEQ ID NO: 115158 - DNA, 21 bp, Artificial Sequence
  primer
ccatcactcaccttgctcttg

SEQ ID NO: 115159 - DNA, 38 bp, Artificial Sequence
  primer
gtaaaacgacggccagtatgggaaagaagaaatcacgg

SEQ ID NO: 115160 - DNA, 27 bp, Artificial Sequence
  primer
gcactatttgtttattccctaagaaag

SEQ ID NO: 115161 - DNA, 23 bp, Artificial Sequence
  primer
cgggatcctaaataatccagaac

SEQ ID NO: 115162 - DNA, 38 bp, Artificial Sequence
  primer
gtaaaacgacggccagtaaatttcactcccacagcaaa

SEQ ID NO: 115163 - DNA, 43 bp, Artificial Sequence
  primer
gtaaaacgacggccagtacattattactgttcgaaactccaaa

SEQ ID NO: 115164 - DNA, 38 bp, Artificial Sequence
  primer
gtaaaacgacggccagtcttcccttgaacacactccaa

SEQ ID NO: 115165 - DNA, 41 bp, Artificial Sequence
  primer
gtaaaacgacggccagtgactagtgagatggcaccttgtaa

SEQ ID NO: 115166 - DNA, 23 bp, Artificial Sequence
  primer
caattcccttctaagaaacatgg

SEQ ID NO: 115167 - DNA, 41 bp, Artificial Sequence
  primer
gtaaaacgacggccagtaattgtaatcctgggcataaattg

SEQ ID NO: 115168 - DNA, 44 bp, Artificial Sequence
  primer
gtaaaacgacggccagtaacatgtaacttcagttgaagaggaac

SEQ ID NO: 115169 - DNA, 43 bp, Artificial Sequence
  primer
gtaaaacgacggccagttctaaataagggttccacaatcagac

SEQ ID NO: 115170 - DNA, 46 bp, Artificial Sequence
  primer
gtaaaacgacggccagtccagatatccaattagaatttaacctaca

SEQ ID NO: 115171 - DNA, 38 bp, Artificial Sequence
  primer
gtaaaacgacggccagtaaagcaagcacaaaccaagac

SEQ ID NO: 115172 - DNA, 25 bp, Artificial Sequence
  primer
tctcactagcttgacttatcaccag

SEQ ID NO: 115173 - DNA, 40 bp, Artificial Sequence
  primer
gtaaaacgacggccagtgccataatggaatgacacagttt

SEQ ID NO: 115174 - DNA, 44 bp, Artificial Sequence
  primer
gtaaaacgacggccagtaatccaatcatatttgataccactttc

SEQ ID NO: 115175 - DNA, 27 bp, Artificial Sequence
  primer
aataattgtgtccattgtttataaggc

SEQ ID NO: 115176 - DNA, 38 bp, Artificial Sequence
  primer
gtaaaacgacggccagtgttgtgggttcattcacatcc

SEQ ID NO: 115177 - DNA, 25 bp, Artificial Sequence
  primer
aaactatctttacgtagtgggctcc

SEQ ID NO: 115178 - DNA, 41 bp, Artificial Sequence
  primer
gtaaaacgacggccagtaaatgctagaaccttaacccacag

SEQ ID NO: 115179 - DNA, 26 bp, Artificial Sequence
  primer
aagctttaacaaagaaagaggaaatc

SEQ ID NO: 115180 - DNA, 24 bp, Artificial Sequence
  primer
aaggcaattgagtctgtatcaacc

SEQ ID NO: 115181 - DNA, 42 bp, Artificial Sequence
  primer
gtaaaacgacggccagttctctggatgcatgtaatgtatagg

SEQ ID NO: 115182 - DNA, 42 bp, Artificial Sequence
  primer
gtaaaacgacggccagtaagataatgttcattcattcccatc

SEQ ID NO: 115183 - DNA, 18 bp, Artificial Sequence
  primer
ctggccttcaggagctgg

SEQ ID NO: 115184 - DNA, 21 bp, Artificial Sequence
  primer
ctctgtctattacctcgcccg

SEQ ID NO: 115185 - DNA, 21 bp, Artificial Sequence
  primer
acaaagtggcaaagccaagtc

SEQ ID NO: 115186 - DNA, 39 bp, Artificial Sequence
  primer
gtaaaacgacggccagttccaccagcacctcattatttc

SEQ ID NO: 115187 - DNA, 20 bp, Artificial Sequence
  primer
ctcattccagctgcttggtg

SEQ ID NO: 115188 - DNA, 38 bp, Artificial Sequence
  primer
gtaaaacgacggccagttgagtttgagggtgagctttg

SEQ ID NO: 115189 - DNA, 21 bp, Artificial Sequence
  primer
cgcagtgaccttgtaggacag

SEQ ID NO: 115190 - DNA, 39 bp, Artificial Sequence
  primer
gtaaaacgacggccagttgatcaggacgcaggatttaag

SEQ ID NO: 115191 - DNA, 20 bp, Artificial Sequence
  primer
caagggctgggactgtagtg

SEQ ID NO: 115192 - DNA, 39 bp, Artificial Sequence
  primer
gtaaaacgacggccagtgccttaacttgggtaaagcctg

SEQ ID NO: 115193 - DNA, 38 bp, Artificial Sequence
  primer
gtaaaacgacggccagtgacgcaggaggctctgttatc

SEQ ID NO: 115194 - DNA, 21 bp, Artificial Sequence
  primer
ttatcttcagggcagggactg

SEQ ID NO: 115195 - DNA, 21 bp, Artificial Sequence
  primer
atgagcttcgagtccttcacc

SEQ ID NO: 115196 - DNA, 37 bp, Artificial Sequence; identical to SEQ ID NO: 97463
  primer

SEQ ID NO: 115197 - DNA, 21 bp, Artificial Sequence
  primer
acaaatcatgggctctgagtg

SEQ ID NO: 115198 - DNA, 22 bp, Artificial Sequence
  primer
tgcatgtcccttcacataattg

SEQ ID NO: 115199 - DNA, 21 bp, Artificial Sequence
  primer
tatggccatgtgccagaatac

SEQ ID NO: 115200 - DNA, 23 bp, Artificial Sequence
  primer
tgcaaagaaagaatacggttgag

SEQ ID NO: 115201 - DNA, 38 bp, Artificial Sequence
  primer
gtaaaacgacggccagttcatgggatttacggacactg

SEQ ID NO: 115202 - DNA, 21 bp, Artificial Sequence
  primer
tctttaaacttggcactgctg

SEQ ID NO: 115203 - DNA, 23 bp, Artificial Sequence
  primer
tcaaggatggaggaatcaattag

SEQ ID NO: 115204 - DNA, 38 bp, Artificial Sequence; identical to SEQ ID NO: 115201
  primer

SEQ ID NO: 115205 - DNA, 22 bp, Artificial Sequence
  primer
gggctgtatagcctgagttgtg

SEQ ID NO: 115206 - DNA, 38 bp, Artificial Sequence
  primer
gtaaaacgacggccagtaagggagggtaatggtcacag

SEQ ID NO: 115207 - DNA, 38 bp, Artificial Sequence
  primer
gtaaaacgacggccagtgaacgtttcacagggtcaagt

SEQ ID NO: 115208 - DNA, 23 bp, Artificial Sequence
  primer
gctttgctacaaatggaacacac

SEQ ID NO: 115209 - DNA, 21 bp, Artificial Sequence
  primer
gaaagcagcaaactgggattc

SEQ ID NO: 115210 - DNA, 20 bp, Artificial Sequence
  primer
gttgccggatcacgttctac

SEQ ID NO: 115211 - DNA, 40 bp, Artificial Sequence
  primer
gtaaaacgacggccagttgtccattccatattctttagcc

SEQ ID NO: 115212 - DNA, 21 bp, Artificial Sequence
  primer
cagcctgagtgacacagtgag

SEQ ID NO: 115213 - DNA, 44 bp, Artificial Sequence
  primer
gtaaaacgacggccagtgccatctgtaaagagattaagaggttc

SEQ ID NO: 115214 - DNA, 22 bp, Artificial Sequence
  primer
gggacagtaatgctgttatggc

SEQ ID NO: 115215 - DNA, 39 bp, Artificial Sequence
  primer
gtaaaacgacggccagtggtgaatcgttcattatttgcc

SEQ ID NO: 115216 - DNA, 38 bp, Artificial Sequence
  primer
gtaaaacgacggccagtgcacattgcctggtatttagg

SEQ ID NO: 115217 - DNA, 37 bp, Artificial Sequence
  primer
gtaaaacgacggccagtaatcatccacgtggcacttc

SEQ ID NO: 115218 - DNA, 21 bp, Artificial Sequence
  primer
aaacgactggacacctctgct

SEQ ID NO: 115219 - DNA, 43 bp, Artificial Sequence
  primer
gtaaaacgacggccagtaagactgaaaggcaatattgtcaact

SEQ ID NO: 115220 - DNA, 37 bp, Artificial Sequence
  primer
gtaaaacgacggccagtttccataggcagggacagtg

SEQ ID NO: 115221 - DNA, 40 bp, Artificial Sequence
  primer
gtaaaacgacggccagttgtggcttagctattgagggtaa

SEQ ID NO: 115222 - DNA, 21 bp, Artificial Sequence
  primer
ggtgatagctgcacaactctg

SEQ ID NO: 115223 - DNA, 22 bp, Artificial Sequence
  primer
catctctgtgaacagcaggaac

SEQ ID NO: 115224 - DNA, 39 bp, Artificial Sequence
  primer
gtaaaacgacggccagtgcataaagcaacagtttcaggg

SEQ ID NO: 115225 - DNA, 45 bp, Artificial Sequence
  primer
gtaaaacgacggccagtccagtatttcctacataacattaaaggg

SEQ ID NO: 115226 - DNA, 22 bp, Artificial Sequence
  primer
gcaagaagcgatgataaagctc

SEQ ID NO: 115227 - DNA, 42 bp, Artificial Sequence
  primer
gtaaaacgacggccagtctgaaacacataaagtgacatggac

SEQ ID NO: 115228 - DNA, 21 bp, Artificial Sequence
  primer
cctctccctccaggagattag

SEQ ID NO: 115229 - DNA, 23 bp, Artificial Sequence
  primer
tttggatcgttcttacagtggtt

SEQ ID NO: 115230 - DNA, 39 bp, Artificial Sequence
  primer
gtaaaacgacggccagtgcctctgtaagtgctaagcagg

SEQ ID NO: 115231 - DNA, 38 bp, Artificial Sequence
  primer
gtaaaacgacggccagtcaccagaccgattctatgctg

SEQ ID NO: 115232 - DNA, 36 bp, Artificial Sequence
  primer
gtaaaacgacggccagttgactcaagcaaccctccc

SEQ ID NO: 115233 - DNA, 43 bp, Artificial Sequence
  primer
gtaaaacgacggccagtagatgtggaatagtggtacaattctg

SEQ ID NO: 115234 - DNA, 40 bp, Artificial Sequence
  primer
gtaaaacgacggccagtttatattcatggaggtgtcaggc

SEQ ID NO: 115235 - DNA, 20 bp, Artificial Sequence
  primer
aagtcaaagcagatggcgag

SEQ ID NO: 115236 - DNA, 39 bp, Artificial Sequence
  primer
gtaaaacgacggccagtcatcttactgcaggaggacaaa

SEQ ID NO: 115237 - DNA, 22 bp, Artificial Sequence
  primer
ccatatggttattcccaaggtg

SEQ ID NO: 115238 - DNA, 38 bp, Artificial Sequence
  primer
gtaaaacgacggccagtggcagatactggcacagaagg

SEQ ID NO: 115239 - DNA, 29 bp, Artificial Sequence
  primer
tgctgtagaaacaggtaatatggtatagg

SEQ ID NO: 115240 - DNA, 23 bp, Artificial Sequence
  primer
tgaattcttcactgccaagagtc

SEQ ID NO: 115241 - DNA, 40 bp, Artificial Sequence
  primer
gtaaaacgacggccagtgcaacctacagtttaatgagccc

SEQ ID NO: 115242 - DNA, 38 bp, Artificial Sequence
  primer
gtaaaacgacggccagtaagcctccatttacagcaagg

SEQ ID NO: 115243 - DNA, 38 bp, Artificial Sequence
  primer
gtaaaacgacggccagtctggatagcagctttggtttg

SEQ ID NO: 115244 - DNA, 43 bp, Artificial Sequence
  primer
gtaaaacgacggccagtggacttgtagaactgacatcattagc

SEQ ID NO: 115245 - DNA, 38 bp, Artificial Sequence
  primer
gtaaaacgacggccagtggcagaaagccatactgactg

SEQ ID NO: 115246 - DNA, 20 bp, Artificial Sequence
  primer
aataggcttgcttggcacag

SEQ ID NO: 115247 - DNA, 38 bp, Artificial Sequence
  primer
gtaaaacgacggccagtcagggtcaattccctgtaatg

SEQ ID NO: 115248 - DNA, 23 bp, Artificial Sequence
  primer
aaccacttagaacgacattgtgc

SEQ ID NO: 115249 - DNA, 24 bp, Artificial Sequence
  primer
ggaaatgcaagacagtaacgtatg

SEQ ID NO: 115250 - DNA, 20 bp, Artificial Sequence
  primer
tcgaacctgtggatgtgttg

SEQ ID NO: 115251 - DNA, 24 bp, Artificial Sequence
  primer
tcatttccttatcctcaccatctc

SEQ ID NO: 115252 - DNA, 39 bp, Artificial Sequence
  primer
gtaaaacgacggccagtgcacagtaagaaatgtttgccc

SEQ ID NO: 115253 - DNA, 39 bp, Artificial Sequence
  primer
gtaaaacgacggccagtaagggtgcccttactaacttcg

SEQ ID NO: 115254 - DNA, 21 bp, Artificial Sequence
  primer
tggccaattcctaattcatgg

SEQ ID NO: 115255 - DNA, 21 bp, Artificial Sequence
  primer
aaagacacatggcagaaaggg

SEQ ID NO: 115256 - DNA, 39 bp, Artificial Sequence
  primer
gtaaaacgacggccagtccaaccttaagtcaaggaaacc

SEQ ID NO: 115257 - DNA, 38 bp, Artificial Sequence
  primer
gtaaaacgacggccagtaggcaggtatgcaagtccatc

SEQ ID NO: 115258 - DNA, 21 bp, Artificial Sequence
  primer
agcacctccaagaaaggtcag

SEQ ID NO: 115259 - DNA, 38 bp, Artificial Sequence
  primer
gtaaaacgacggccagtatgaaaccaggagaaaggcag

SEQ ID NO: 115260 - DNA, 21 bp, Artificial Sequence
  primer
ttcctggtccactcctgattc

SEQ ID NO: 115261 - DNA, 21 bp, Artificial Sequence
  primer
gtttctttccgctggacacac

SEQ ID NO: 115262 - DNA, 38 bp, Artificial Sequence
  primer
gtaaaacgacggccagtctgcaggcatagatgagatgg

SEQ ID NO: 115263 - DNA, 38 bp, Artificial Sequence
  primer
gtaaaacgacggccagtagagccaggtagccttatccc

SEQ ID NO: 115264 - DNA, 38 bp, Artificial Sequence
  primer
gtaaaacgacggccagtggtcaagagtcgagccacttc

SEQ ID NO: 115265 - DNA, 21 bp, Artificial Sequence
  primer
gtactcaccatcactgccagc

SEQ ID NO: 115266 - DNA, 38 bp, Artificial Sequence
  primer
gtaaaacgacggccagttctccatctcaacaagcctcc

SEQ ID NO: 115267 - DNA, 41 bp, Artificial Sequence
  primer
gtaaaacgacggccagttcatatcccttcaacgttctatcc

SEQ ID NO: 115268 - DNA, 22 bp, Artificial Sequence
  primer
gcatccagcccactctataaac

SEQ ID NO: 115269 - DNA, 37 bp, Artificial Sequence
  primer
gtaaaacgacggccagtcctgaagatcagcaggaggg

SEQ ID NO: 115270 - DNA, 23 bp, Artificial Sequence
  primer
gggataaatcaaactccatcctg

SEQ ID NO: 115271 - DNA, 21 bp, Artificial Sequence
  primer
atgaacattagctctcctgcg

SEQ ID NO: 115272 - DNA, 18 bp, Artificial Sequence
  primer
cgcatccagcctgttctc

SEQ ID NO: 115273 - DNA, 21 bp, Artificial Sequence
  primer
gcaacagagcaagactccatc

SEQ ID NO: 115274 - DNA, 39 bp, Artificial Sequence
  primer
gtaaaacgacggccagtcatgccttcctcacaatgaaac

SEQ ID NO: 115275 - DNA, 26 bp, Artificial Sequence
  primer
aaatttctggtcttcaaacatttctc

SEQ ID NO: 115276 - DNA, 38 bp, Artificial Sequence
  primer
gtaaaacgacggccagtggaagatcctttccttcagcc

SEQ ID NO: 115277 - DNA, 21 bp, Artificial Sequence
  primer
cggcccagtatttgttaaatg

SEQ ID NO: 115278 - DNA, 23 bp, Artificial Sequence
  primer
ttcaacactctcaaggaagaagg

SEQ ID NO: 115279 - DNA, 38 bp, Artificial Sequence
  primer
gtaaaacgacggccagtagtccctctaccctgcaacac

SEQ ID NO: 115280 - DNA, 39 bp, Artificial Sequence
  primer
gtaaaacgacggccagttgtaaacgttcttccacttgcc

SEQ ID NO: 115281 - DNA, 21 bp, Artificial Sequence
  primer
tttctggagggcttgactctc

SEQ ID NO: 115282 - DNA, 38 bp, Artificial Sequence
  primer
gtaaaacgacggccagtgttccaatgctgcgttatcag

SEQ ID NO: 115283 - DNA, 21 bp, Artificial Sequence
  primer
aaagcgtgcaatttcagtgtg

SEQ ID NO: 115284 - DNA, 21 bp, Artificial Sequence
  primer
aggcgttccatccataaagag

SEQ ID NO: 115285 - DNA, 21 bp, Artificial Sequence
  primer
tctaggcgattcaaactggtg

SEQ ID NO: 115286 - DNA, 38 bp, Artificial Sequence
  primer
gtaaaacgacggccagtggagcacaacttcaactccac

SEQ ID NO: 115287 - DNA, 38 bp, Artificial Sequence
  primer
gtaaaacgacggccagtctccatatgcttcatggcttg

SEQ ID NO: 115288 - DNA, 21 bp, Artificial Sequence
  primer
gaatgggtccaaagcaatcac

SEQ ID NO: 115289 - DNA, 24 bp, Artificial Sequence
  primer
gccttctcatttgaaggattgttt

SEQ ID NO: 115290 - DNA, 40 bp, Artificial Sequence
  primer
gtaaaacgacggccagtccagcctaggagacaggacttac

SEQ ID NO: 115291 - DNA, 39 bp, Artificial Sequence
  primer
gtaaaacgacggccagtggctttgagatttagcttgtgc

SEQ ID NO: 115292 - DNA, 21 bp, Artificial Sequence
  primer
gaatgggtccaaagcaatcac

SEQ ID NO: 115293 - DNA, 40 bp, Artificial Sequence; identical to SEQ ID NO: 115290
  primer

SEQ ID NO: 115294 - DNA, 38 bp, Artificial Sequence
  primer
gtaaaacgacggccagtttcctcatggctctacagtgg

SEQ ID NO: 115295 - DNA, 40 bp, Artificial Sequence; identical to SEQ ID NO: 115290
  primer

SEQ ID NO: 115296 - DNA, 37 bp, Artificial Sequence
  primer
gtaaaacgacggccagtgttccttagtccaaacccgc

SEQ ID NO: 115297 - DNA, 22 bp, Artificial Sequence
  primer
ccatctatttcgctcagaatcc

SEQ ID NO: 115298 - DNA, 37 bp, Artificial Sequence
  primer
gtaaaacgacggccagtctagcatgccagtcctcacc

SEQ ID NO: 115299 - DNA, 21 bp, Artificial Sequence
  primer
gggtacgctttaccttccaac

SEQ ID NO: 115300 - DNA, 25 bp, Artificial Sequence
  primer
cctgtctaggtctttgtggtatgtg

SEQ ID NO: 115301 - DNA, 27 bp, Artificial Sequence
  primer
aactatgtggaattaaagtaacttggg

SEQ ID NO: 115302 - DNA, 40 bp, Artificial Sequence
  primer
gtaaaacgacggccagtagttctgtagttcacttgtgccc

SEQ ID NO: 115303 - DNA, 21 bp, Artificial Sequence
  primer
agcttcaacaggcttctcgtc

SEQ ID NO: 115304 - DNA, 21 bp, Artificial Sequence
  primer
ctgaactggtttcaatggcag

SEQ ID NO: 115305 - DNA, 24 bp, Artificial Sequence
  primer
tggtctctatcaaagaaacttgcc

SEQ ID NO: 115306 - DNA, 21 bp, Artificial Sequence
  primer
acccgtcactgcctatacagc

SEQ ID NO: 115307 - DNA, 21 bp, Artificial Sequence
  primer
aaagcaactctttggtcatgg

SEQ ID NO: 115308 - DNA, 20 bp, Artificial Sequence
  primer
cagaggaagggacattgtgg

SEQ ID NO: 115309 - DNA, 38 bp, Artificial Sequence
  primer
gtaaaacgacggccagtagacacaagagtacgggccac

SEQ ID NO: 115310 - DNA, 21 bp, Artificial Sequence
  primer
tgaccagttcaacgctgagtc

SEQ ID NO: 115311 - DNA, 18 bp, Artificial Sequence
  primer
aggagtgactcgggtgcc

SEQ ID NO: 115312 - DNA, 21 bp, Artificial Sequence
  primer
gacaggttgacaccattcagg

SEQ ID NO: 115313 - DNA, 38 bp, Artificial Sequence
  primer
gtaaaacgacggccagtctgccttcccatctctgtgac

SEQ ID NO: 115314 - DNA, 40 bp, Artificial Sequence
  primer
gtaaaacgacggccagttgtctttaatggaggaatctgcc

SEQ ID NO: 115315 - DNA, 42 bp, Artificial Sequence
  primer
gtaaaacgacggccagtgaaggttagacttcctttgagatgg

SEQ ID NO: 115316 - DNA, 21 bp, Artificial Sequence
  primer
ctgtgaagttccacccatttg

SEQ ID NO: 115317 - DNA, 22 bp, Artificial Sequence
  primer
aagttcacagcactttatgccc

SEQ ID NO: 115318 - DNA, 21 bp, Artificial Sequence
  primer
tgctctgtgacaggacgagac

SEQ ID NO: 115319 - DNA, 38 bp, Artificial Sequence
  primer
gtaaaacgacggccagtatgactgctcaagcttccctc

SEQ ID NO: 115320 - DNA, 20 bp, Artificial Sequence
  primer
tacaggcatgagccattgtg

SEQ ID NO: 115321 - DNA, 37 bp, Artificial Sequence
  primer
gtaaaacgacggccagtctagtggcggaagaaggtgg

SEQ ID NO: 115322 - DNA, 20 bp, Artificial Sequence
  primer
agtgacatcgcatccctagc

SEQ ID NO: 115323 - DNA, 38 bp, Artificial Sequence
  primer
gtaaaacgacggccagtttgagccagacaagcagtcag

SEQ ID NO: 115324 - DNA, 21 bp, Artificial Sequence
  primer
gcttcgaatgtcatcaacctg

SEQ ID NO: 115325 - DNA, 38 bp, Artificial Sequence
  primer
gtaaaacgacggccagttcagcttcagatgcctaaggg

SEQ ID NO: 115326 - DNA, 22 bp, Artificial Sequence
  primer
cccaattcctaaatatgggctc

SEQ ID NO: 115327 - DNA, 40 bp, Artificial Sequence
  primer
gtaaaacgacggccagttgaaaggatttgtaaggcagatt

SEQ ID NO: 115328 - DNA, 42 bp, Artificial Sequence
  primer
gtaaaacgacggccagtaatatgattcaactcattcctgctc

SEQ ID NO: 115329 - DNA, 38 bp, Artificial Sequence
  primer
gtaaaacgacggccagttgactcaagcccaaagtgatg

SEQ ID NO: 115330 - DNA, 38 bp, Artificial Sequence
  primer
gtaaaacgacggccagtaagctttagaatgcccacagc

SEQ ID NO: 115331 - DNA, 21 bp, Artificial Sequence
  primer
atctattggagcctgtcctgc

SEQ ID NO: 115332 - DNA, 21 bp, Artificial Sequence
  primer
gtgcctggattgaatgacctc

SEQ ID NO: 115333 - DNA, 37 bp, Artificial Sequence
  primer
gtaaaacgacggccagtcaattccacctatttggccc

SEQ ID NO: 115334 - DNA, 22 bp, Artificial Sequence
  primer
tttctgtcctgtaagacagccc

SEQ ID NO: 115335 - DNA, 40 bp, Artificial Sequence
  primer
gtaaaacgacggccagtggtaggccacaatactctgtgag

SEQ ID NO: 115336 - DNA, 21 bp, Artificial Sequence
  primer
gttccaggtgacaataccagc

SEQ ID NO: 115337 - DNA, 39 bp, Artificial Sequence
  primer
gtaaaacgacggccagtcttcagagagacacattcaggc

SEQ ID NO: 115338 - DNA, 38 bp, Artificial Sequence
  primer
gtaaaacgacggccagtcatggcgatagctccatacac

SEQ ID NO: 115339 - DNA, 22 bp, Artificial Sequence
  primer
aataggccatatgaaccagcac

SEQ ID NO: 115340 - DNA, 21 bp, Artificial Sequence
  primer
ttggagaaaccaaacatccac

SEQ ID NO: 115341 - DNA, 21 bp, Artificial Sequence
  primer
cagacctctgaaattgccctc

SEQ ID NO: 115342 - DNA, 21 bp, Artificial Sequence
  primer
aaagtgatcctcctgctttgg

SEQ ID NO: 115343 - DNA, 22 bp, Artificial Sequence
  primer
caacccacagtgcacagtaaag

SEQ ID NO: 115344 - DNA, 38 bp, Artificial Sequence
  primer
gtaaaacgacggccagttgctgatggcagaagtgagac

SEQ ID NO: 115345 - DNA, 25 bp, Artificial Sequence
  primer
aacaatagaaacaaactcaagtggc

SEQ ID NO: 115346 - DNA, 21 bp, Artificial Sequence
  primer
atatcctgtggtgaagctgcc

SEQ ID NO: 115347 - DNA, 19 bp, Artificial Sequence
  primer
atccttgcaaagcaggagg

SEQ ID NO: 115348 - DNA, 38 bp, Artificial Sequence
  primer
gtaaaacgacggccagtcagatttcccaagaccctttg

SEQ ID NO: 115349 - DNA, 38 bp, Artificial Sequence
  primer
gtaaaacgacggccagttgacctcacaacatctctggg

SEQ ID NO: 115350 - DNA, 38 bp, Artificial Sequence
  primer
gtaaaacgacggccagttccctgatccctgaatcaaac

SEQ ID NO: 115351 - DNA, 38 bp, Artificial Sequence
  primer
gtaaaacgacggccagtctggactgagtgtggcagttg

SEQ ID NO: 115352 - DNA, 21 bp, Artificial Sequence
  primer
ggcccaaatagactctccctc

SEQ ID NO: 115353 - DNA, 21 bp, Artificial Sequence
  primer
tcccaaagagctgcctaagag

SEQ ID NO: 115354 - DNA, 39 bp, Artificial Sequence
  primer
gtaaaacgacggccagtaagggaggaggtgaactgtttc

SEQ ID NO: 115355 - DNA, 21 bp, Artificial Sequence
  primer
ggatctcccagcagctatcag

SEQ ID NO: 115356 - DNA, 38 bp, Artificial Sequence
  primer
gtaaaacgacggccagtttccatcactttactccacca

SEQ ID NO: 115357 - DNA, 38 bp, Artificial Sequence
  primer
gtaaaacgacggccagtttggcccaaacatatcaagtc

SEQ ID NO: 115358 - DNA, 21 bp, Artificial Sequence
  primer
tctgctttgaaatggcaactg

SEQ ID NO: 115359 - DNA, 21 bp, Artificial Sequence
  primer
gggtgaattacagcttcaggc

SEQ ID NO: 115360 - DNA, 39 bp, Artificial Sequence
  primer
gtaaaacgacggccagtgggcaacaagagtgaaactcag

SEQ ID NO: 115361 - DNA, 22 bp, Artificial Sequence
  primer
ctggctacagagcaagactgtg

SEQ ID NO: 115362 - DNA, 38 bp, Artificial Sequence
  primer
gtaaaacgacggccagtagcctcattcttcacctctcc

SEQ ID NO: 115363 - DNA, 21 bp, Artificial Sequence
  primer
gtgggaggaaagaatgagtcc

SEQ ID NO: 115364 - DNA, 20 bp, Artificial Sequence
  primer
aaagatcagaaggcgccaag

SEQ ID NO: 115365 - DNA, 40 bp, Artificial Sequence
  primer
gtaaaacgacggccagttgcgtgtatctgtatttcaaggc

SEQ ID NO: 115366 - DNA, 27 bp, Artificial Sequence
  primer
caagttaaccctagtccttatttctgg

SEQ ID NO: 115367 - DNA, 42 bp, Artificial Sequence
  primer
gtaaaacgacggccagtcaaatagaaggtatgcggttatgtc

SEQ ID NO: 115368 - DNA, 36 bp, Artificial Sequence
  primer
gtaaaacgacggccagttttgccttcaaatcctgcc

SEQ ID NO: 115369 - DNA, 21 bp, Artificial Sequence
  primer
gatcctcagaactgctccgtc

SEQ ID NO: 115370 - DNA, 43 bp, Artificial Sequence
  primer
gtaaaacgacggccagtggtggaaagaatgagaatgtattatg

SEQ ID NO: 115371 - DNA, 27 bp, Artificial Sequence
  primer
tgaataaatgaacagtaactaaacggg

SEQ ID NO: 115372 - DNA, 24 bp, Artificial Sequence
  primer
aaaggtacttcacaactttgcctg

SEQ ID NO: 115373 - DNA, 21 bp, Artificial Sequence
  primer
cgcacaaacttccatctcaac

SEQ ID NO: 115374 - DNA, 23 bp, Artificial Sequence
  primer
tggtggaagataagactgtggtc

SEQ ID NO: 115375 - DNA, 20 bp, Artificial Sequence
  primer
cgcctgtctcgtttaccatc

SEQ ID NO: 115376 - DNA, 21 bp, Artificial Sequence
  primer
ccagactgaatgcttccaagg

SEQ ID NO: 115377 - DNA, 21 bp, Artificial Sequence
  primer
tggctcaggaaactggtacac

SEQ ID NO: 115378 - DNA, 21 bp, Artificial Sequence
  primer
ccttgagattcctgaccctcc

SEQ ID NO: 115379 - DNA, 21 bp, Artificial Sequence
  primer
tgtgatactgggaggaaaccc

SEQ ID NO: 115380 - DNA, 21 bp, Artificial Sequence
  primer
ggatctgtgctgaaggtgaag

SEQ ID NO: 115381 - DNA, 38 bp, Artificial Sequence
  primer
gtaaaacgacggccagtgctggaatgataagcatgtgg

SEQ ID NO: 115382 - DNA, 38 bp, Artificial Sequence
  primer
gtaaaacgacggccagtgcttcctttatcctttggcag

SEQ ID NO: 115383 - DNA, 21 bp, Artificial Sequence
  primer
tttattggctgccagaggaac

SEQ ID NO: 115384 - DNA, 38 bp, Artificial Sequence
  primer
gtaaaacgacggccagtccactttccctttctccactg

SEQ ID NO: 115385 - DNA, 38 bp, Artificial Sequence
  primer
gtaaaacgacggccagtcaatcatgtgaaacctcgcac

SEQ ID NO: 115386 - DNA, 24 bp, Artificial Sequence
  primer
tgagagtatctgctaatttccgag

SEQ ID NO: 115387 - DNA, 37 bp, Artificial Sequence
  primer
gtaaaacgacggccagtaacaacatcaacagcagccc

SEQ ID NO: 115388 - DNA, 21 bp, Artificial Sequence
  primer
gcctttccatctatgtgggtc

SEQ ID NO: 115389 - DNA, 39 bp, Artificial Sequence
  primer
gtaaaacgacggccagttcccaagatacatgctactgcc

SEQ ID NO: 115390 - DNA, 21 bp, Artificial Sequence
  primer
tcagaagccggtatcattgtc

SEQ ID NO: 115391 - DNA, 21 bp, Artificial Sequence
  primer
agagcagaactctgtggatgc

SEQ ID NO: 115392 - DNA, 21 bp, Artificial Sequence
  primer
gactgcacacctgacatttcc

SEQ ID NO: 115393 - DNA, 23 bp, Artificial Sequence
  primer
ggaggcccagaatctagtagttg

SEQ ID NO: 115394 - DNA, 21 bp, Artificial Sequence
  primer
gacacaaccatacgggatttg

SEQ ID NO: 115395 - DNA, 19 bp, Artificial Sequence
  primer
gaggaccttggtccacagc

SEQ ID NO: 115396 - DNA, 21 bp, Artificial Sequence
  primer
gcatccctggattgaagaaac

SEQ ID NO: 115397 - DNA, 21 bp, Artificial Sequence
  primer
agcctcaggttcttgccatag

SEQ ID NO: 115398 - DNA, 38 bp, Artificial Sequence
  primer
gtaaaacgacggccagtagtcaccatgtcagctggaac

SEQ ID NO: 115399 - DNA, 21 bp, Artificial Sequence
  primer
actgggagggtctcacatagc

SEQ ID NO: 115400 - DNA, 21 bp, Artificial Sequence
  primer
gaagcccgacctatgagtcac

SEQ ID NO: 115401 - DNA, 38 bp, Artificial Sequence
  primer
gtaaaacgacggccagtacttcagcatcacctccactg

SEQ ID NO: 115402 - DNA, 21 bp, Artificial Sequence
  primer
ccagaaggactgacaccacag

SEQ ID NO: 115403 - DNA, 38 bp, Artificial Sequence
  primer
gtaaaacgacggccagtgtgccacacctcttcttctcc

SEQ ID NO: 115404 - DNA, 21 bp, Artificial Sequence
  primer
agagccatcaaatctgccaag

SEQ ID NO: 115405 - DNA, 21 bp, Artificial Sequence
  primer
cctgctctatggacactctgg

SEQ ID NO: 115406 - DNA, 38 bp, Artificial Sequence
  primer
gtaaaacgacggccagttctacggccttaggagtggtg

SEQ ID NO: 115407 - DNA, 38 bp, Artificial Sequence
  primer
gtaaaacgacggccagtcctagagacacagcagccatc

SEQ ID NO: 115408 - DNA, 21 bp, Artificial Sequence
  primer
agtggtcactgatgttgaggg

SEQ ID NO: 115409 - DNA, 21 bp, Artificial Sequence
  primer
gggtggactacagtcacaggg

SEQ ID NO: 115410 - DNA, 20 bp, Artificial Sequence
  primer
caccacacctgttgatctgc

SEQ ID NO: 115411 - DNA, 21 bp, Artificial Sequence
  primer
aagctgtactcgtgctcggac

SEQ ID NO: 115412 - DNA, 21 bp, Artificial Sequence
  primer
gggtctgggtacaggtaggtg

SEQ ID NO: 115413 - DNA, 36 bp, Artificial Sequence
  primer
gtaaaacgacggccagtaggaacagcatgtcctgcg

SEQ ID NO: 115414 - DNA, 19 bp, Artificial Sequence
  primer
gtgcagggaggaagctgag

SEQ ID NO: 115415 - DNA, 19 bp, Artificial Sequence
  primer
cctcactgaagggtggctg

SEQ ID NO: 115416 - DNA, 21 bp, Artificial Sequence
  primer
ccaagccagcttctacattcc

SEQ ID NO: 115417 - DNA, 21 bp, Artificial Sequence
  primer
aacactggctgtgtgaactgg

SEQ ID NO: 115418 - DNA, 21 bp, Artificial Sequence
  primer
ggagccaaccaacaaattagg

SEQ ID NO: 115419 - DNA, 20 bp, Artificial Sequence
  primer
taatgggctcatgctcaagg

SEQ ID NO: 115420 - DNA, 38 bp, Artificial Sequence
  primer
gtaaaacgacggccagtaggtactcatcccactcaggg

SEQ ID NO: 115421 - DNA, 21 bp, Artificial Sequence
  primer
ctgtactcaagcgatccatcc

SEQ ID NO: 115422 - DNA, 21 bp, Artificial Sequence
  primer
ggactcaagtgatcctcccac

SEQ ID NO: 115423 - DNA, 21 bp, Artificial Sequence
  primer
ccttccaatttggctcaagtc

SEQ ID NO: 115424 - DNA, 22 bp, Artificial Sequence
  primer
tgcacagaaataggagagaggg

SEQ ID NO: 115425 - DNA, 38 bp, Artificial Sequence
  primer
gtaaaacgacggccagtcggttggtcattgtagagcag

SEQ ID NO: 115426 - DNA, 20 bp, Artificial Sequence
  primer
gaatagatgcccagggtctg

SEQ ID NO: 115427 - DNA, 20 bp, Artificial Sequence
  primer
gaattcctgggcaaagatcc

SEQ ID NO: 115428 - DNA, 21 bp, Artificial Sequence
  primer
atagctcccaaacagacctgg

SEQ ID NO: 115429 - DNA, 21 bp, Artificial Sequence
  primer
cagggctggtagttcttcacc

SEQ ID NO: 115430 - DNA, 38 bp, Artificial Sequence
  primer
gtaaaacgacggccagttacaggcatttatcaccgtgc

SEQ ID NO: 115431 - DNA, 21 bp, Artificial Sequence
  primer
tgaactgatccgtgactttcc

SEQ ID NO: 115432 - DNA, 43 bp, Artificial Sequence
  primer
gtaaaacgacggccagttgcaggttataagtatattcacaggc

SEQ ID NO: 115433 - DNA, 19 bp, Artificial Sequence
  primer
tgggcaacaagagcgaaac

SEQ ID NO: 115434 - DNA, 21 bp, Artificial Sequence
  primer
gttaccctcccaattcccaag

SEQ ID NO: 115435 - DNA, 19 bp, Artificial Sequence
  primer
aggcggcaccactaacaag

SEQ ID NO: 115436 - DNA, 24 bp, Artificial Sequence
  primer
tcattacttggaactgagggaaag

SEQ ID NO: 115437 - DNA, 22 bp, Artificial Sequence
  primer
ttcaaagcatgctaccataacc

SEQ ID NO: 115438 - DNA, 21 bp, Artificial Sequence
  primer
tgggcaacaagagtgaaactt

SEQ ID NO: 115439 - DNA, 22 bp, Artificial Sequence
  primer
cctctttggaaacatccagtcc

SEQ ID NO: 115440 - DNA, 38 bp, Artificial Sequence
  primer
gtaaaacgacggccagtgcccagatgatagaccctgac

SEQ ID NO: 115441 - DNA, 21 bp, Artificial Sequence
  primer
gaacccgagtactttcgatgg

SEQ ID NO: 115442 - DNA, 21 bp, Artificial Sequence
  primer
taaagctggtttgcttgatgg

SEQ ID NO: 115443 - DNA, 38 bp, Artificial Sequence
  primer
gtaaaacgacggccagtcggtgagtacaaagggtcctc

SEQ ID NO: 115444 - DNA, 38 bp, Artificial Sequence
  primer
gtaaaacgacggccagttgggattacaggcatgatgag

SEQ ID NO: 115445 - DNA, 21 bp, Artificial Sequence
  primer
ctgccaggtgtccacactaag

SEQ ID NO: 115446 - DNA, 39 bp, Artificial Sequence
  primer
gtaaaacgacggccagtaagaagcaccatgaagaagtgg

SEQ ID NO: 115447 - DNA, 24 bp, Artificial Sequence
  primer
tctctgctttgaaacagcaaatag

SEQ ID NO: 115448 - DNA, 21 bp, Artificial Sequence
  primer
ctttcctgctggcgtgtttat

SEQ ID NO: 115449 - DNA, 20 bp, Artificial Sequence
  primer
aactcttggcgggactgttc

SEQ ID NO: 115450 - DNA, 38 bp, Artificial Sequence
  primer
gtaaaacgacggccagtacagcatttcaccgtgttagc

SEQ ID NO: 115451 - DNA, 38 bp, Artificial Sequence
  primer
gtaaaacgacggccagtgaaagctcagtcacagcaagg

SEQ ID NO: 115452 - DNA, 38 bp, Artificial Sequence
  primer
gtaaaacgacggccagtgccctgaggatgaacaaagtc

SEQ ID NO: 115453 - DNA, 21 bp, Artificial Sequence
  primer
acacaaacttggcttgtcacg

SEQ ID NO: 115454 - DNA, 38 bp, Artificial Sequence
  primer
gtaaaacgacggccagttcggatttcagttcaatcacc

SEQ ID NO: 115455 - DNA, 20 bp, Artificial Sequence
  primer
accacagatgacaaggctcc

SEQ ID NO: 115456 - DNA, 21 bp, Artificial Sequence
  primer
atcacttgagcccaggaagtc

SEQ ID NO: 115457 - DNA, 19 bp, Artificial Sequence
  primer
acatgcgtcagcctttgtg

SEQ ID NO: 115458 - DNA, 37 bp, Artificial Sequence
  primer
gtaaaacgacggccagtaacaaacacaggcccagaag

SEQ ID NO: 115459 - DNA, 21 bp, Artificial Sequence
  primer
agtttggccagggtgactctc

SEQ ID NO: 115460 - DNA, 38 bp, Artificial Sequence
  primer
gtaaaacgacggccagtgggcctgaaagacacagaaac

SEQ ID NO: 115461 - DNA, 21 bp, Artificial Sequence
  primer
caccatccactgttctccttg

SEQ ID NO: 115462 - DNA, 20 bp, Artificial Sequence
  primer
ggcgacagacactccatctc

SEQ ID NO: 115463 - DNA, 38 bp, Artificial Sequence
  primer
gtaaaacgacggccagtatggctttgagagaggtacgg

SEQ ID NO: 115464 - DNA, 21 bp, Artificial Sequence
  primer
ccttccgtctttaaccacagc

SEQ ID NO: 115465 - DNA, 42 bp, Artificial Sequence
  primer
gtaaaacgacggccagtagcaataatagggtcaagtgtcaag

SEQ ID NO: 115466 - DNA, 38 bp, Artificial Sequence
  primer
gtaaaacgacggccagtatcccaagacatgtgaactgc

SEQ ID NO: 115467 - DNA, 21 bp, Artificial Sequence
  primer
ccacggttgtcattaccagac

SEQ ID NO: 115468 - DNA, 24 bp, Artificial Sequence
  primer
tttaatttgctcagactttggttg

SEQ ID NO: 115469 - DNA, 20 bp, Artificial Sequence
  primer
gtccatgactccagagctgc

SEQ ID NO: 115470 - DNA, 35 bp, Artificial Sequence
  primer
gtaaaacgacggccagtgttcaagaccagcgtggg

SEQ ID NO: 115471 - DNA, 21 bp, Artificial Sequence
  primer
aggtgcagcatttcagaggtc

SEQ ID NO: 115472 - DNA, 21 bp, Artificial Sequence
  primer
aggtccatggtcagcttgttc

SEQ ID NO: 115473 - DNA, 37 bp, Artificial Sequence
  primer
gtaaaacgacggccagtaccacctttggagggaagac

SEQ ID NO: 115474 - DNA, 21 bp, Artificial Sequence
  primer
gaaggaagggacaggtaccac

SEQ ID NO: 115475 - DNA, 23 bp, Artificial Sequence
  primer
gcacagagaagtaacccaagagg

SEQ ID NO: 115476 - DNA, 37 bp, Artificial Sequence
  primer
gtaaaacgacggccagtaccacacctgaccaatcgag

SEQ ID NO: 115477 - DNA, 36 bp, Artificial Sequence
  primer
gtaaaacgacggccagtggcaccacctggctctaac

SEQ ID NO: 115478 - DNA, 21 bp, Artificial Sequence
  primer
tcaaactcctgggatcaagtg

SEQ ID NO: 115479 - DNA, 35 bp, Artificial Sequence
  primer
gtaaaacgacggccagtagcatgaggcctggtgtg

SEQ ID NO: 115480 - DNA, 21 bp, Artificial Sequence
  primer
gaggcaagttaggtccattcc

SEQ ID NO: 115481 - DNA, 38 bp, Artificial Sequence
  primer
gtaaaacgacggccagttccttcaaagagaccaggcac

SEQ ID NO: 115482 - DNA, 21 bp, Artificial Sequence
  primer
agaaagaggcccatgtttcag

SEQ ID NO: 115483 - DNA, 35 bp, Artificial Sequence
  primer
gtaaaacgacggccagttgagtcactgcacctggc

SEQ ID NO: 115484 - DNA, 21 bp, Artificial Sequence
  primer
cctaaagagcaaagcccacac

SEQ ID NO: 115485 - DNA, 21 bp, Artificial Sequence
  primer
agaaaggagggatggcttagg

SEQ ID NO: 115486 - DNA, 21 bp, Artificial Sequence
  primer
tggaaaccagaacctttgagg

SEQ ID NO: 115487 - DNA, 37 bp, Artificial Sequence
  primer
gtaaaacgacggccagtagccgaaagttctgggattg

SEQ ID NO: 115488 - DNA, 23 bp, Artificial Sequence
  primer
gctgggaagaaccaattgataac

SEQ ID NO: 115489 - DNA, 21 bp, Artificial Sequence
  primer
taaagagcgaattcaccgagg

SEQ ID NO: 115490 - DNA, 38 bp, Artificial Sequence
  primer
gtaaaacgacggccagtgccacagatgggactgttctc

SEQ ID NO: 115491 - DNA, 21 bp, Artificial Sequence
  primer
aataacgagaacagcacacgc

SEQ ID NO: 115492 - DNA, 38 bp, Artificial Sequence
  primer
gtaaaacgacggccagtcaccgcaaagctttatccttc

SEQ ID NO: 115493 - DNA, 38 bp, Artificial Sequence
  primer
gtaaaacgacggccagtggctttgtaaactgctacggg

SEQ ID NO: 115494 - DNA, 21 bp, Artificial Sequence
  primer
gaagtgtttgccacaaacgtg

SEQ ID NO: 115495 - DNA, 20 bp, Artificial Sequence
  primer
ccaaggagctactgtgcagg

SEQ ID NO: 115496 - DNA, 21 bp, Artificial Sequence
  primer
atggcaaaggtaatgtggtcc

SEQ ID NO: 115497 - DNA, 38 bp, Artificial Sequence
  primer
gtaaaacgacggccagttgaggtgagattacaccacgg

SEQ ID NO: 115498 - DNA, 38 bp, Artificial Sequence
  primer
gtaaaacgacggccagtgagagcgcagacacaacattc

SEQ ID NO: 115499 - DNA, 22 bp, Artificial Sequence
  primer
ttgaaagcatccctttaagcag

SEQ ID NO: 115500 - DNA, 21 bp, Artificial Sequence
  primer
ttaggaggagactgtagcccg

SEQ ID NO: 115501 - DNA, 38 bp, Artificial Sequence
  primer
gtaaaacgacggccagttgcttggttaaagccttctgc

SEQ ID NO: 115502 - DNA, 21 bp, Artificial Sequence
  primer
cacctgcacacacaaagtgag

SEQ ID NO: 115503 - DNA, 37 bp, Artificial Sequence
  primer
gtaaaacgacggccagtgttccagttatgctcgggtg

SEQ ID NO: 115504 - DNA, 38 bp, Artificial Sequence
  primer
gtaaaacgacggccagtcacttctgcatttggtgatgg

SEQ ID NO: 115505 - DNA, 21 bp, Artificial Sequence
  primer
cacagctttcctcctcactcc

SEQ ID NO: 115506 - DNA, 38 bp, Artificial Sequence
  primer
gtaaaacgacggccagtcatttggaaatgatgtcaggg

SEQ ID NO: 115507 - DNA, 20 bp, Artificial Sequence
  primer
gacagcagtgcacactcacc

SEQ ID NO: 115508 - DNA, 20 bp, Artificial Sequence
  primer
caccggtgtgagtacgttcc

SEQ ID NO: 115509 - DNA, 38 bp, Artificial Sequence
  primer
gtaaaacgacggccagtccaccttgagggtaagagcac

SEQ ID NO: 115510 - DNA, 38 bp, Artificial Sequence
  primer
gtaaaacgacggccagttggatgttctgtggaaagcag

SEQ ID NO: 115511 - DNA, 21 bp, Artificial Sequence
  primer
gcatgtatctgggaacaatgg

SEQ ID NO: 115512 - DNA, 21 bp, Artificial Sequence
  primer
agtggaacccaggcatagaag

SEQ ID NO: 115513 - DNA, 21 bp, Artificial Sequence
  primer
cagcttcctccaacctcagac

SEQ ID NO: 115514 - DNA, 41 bp, Artificial Sequence
  primer
gtaaaacgacggccagtagggagtcctatttatccatttga

SEQ ID NO: 115515 - DNA, 21 bp, Artificial Sequence
  primer
catgcaacctgaaccataagc

SEQ ID NO: 115516 - DNA, 26 bp, Artificial Sequence
  primer
cagtattctaacagtggtgttgttgc

SEQ ID NO: 115517 - DNA, 21 bp, Artificial Sequence
  primer
caacagctccagcatttcaac

SEQ ID NO: 115518 - DNA, 38 bp, Artificial Sequence
  primer
gtaaaacgacggccagtaagaggctttggctttcagtg

SEQ ID NO: 115519 - DNA, 41 bp, Artificial Sequence
  primer
gtaaaacgacggccagtaaattgttactgaaattgtggacg

SEQ ID NO: 115520 - DNA, 39 bp, Artificial Sequence
  primer
gtaaaacgacggccagtgctgttcagcaagatcaattcc

SEQ ID NO: 115521 - DNA, 21 bp, Artificial Sequence
  primer
tggacagaacaatctggcttc

SEQ ID NO: 115522 - DNA, 20 bp, Artificial Sequence
  primer
agacagatgcaatgcagcac

SEQ ID NO: 115523 - DNA, 38 bp, Artificial Sequence
  primer
gtaaaacgacggccagtaaagccagtgcttccttcatc

SEQ ID NO: 115524 - DNA, 21 bp, Artificial Sequence
  primer
tctaggatgtgagggtttggc

SEQ ID NO: 115525 - DNA, 39 bp, Artificial Sequence
  primer
gtaaaacgacggccagtgctttctcataatgcaaggtgg

SEQ ID NO: 115526 - DNA, 38 bp, Artificial Sequence
  primer
gtaaaacgacggccagttagggacaactgtttccaggg

SEQ ID NO: 115527 - DNA, 38 bp, Artificial Sequence
  primer
gtaaaacgacggccagtgaaagagggagagactgcgag

SEQ ID NO: 115528 - DNA, 21 bp, Artificial Sequence
  primer
gcacgttagagagggtccttg

SEQ ID NO: 115529 - DNA, 21 bp, Artificial Sequence
  primer
aatacttggagcaaagctggc

SEQ ID NO: 115530 - DNA, 38 bp, Artificial Sequence
  primer
gtaaaacgacggccagtctttctggaagcttctacgcc

SEQ ID NO: 115531 - DNA, 21 bp, Artificial Sequence
  primer
gatgttcccttagcaaggctg

SEQ ID NO: 115532 - DNA, 21 bp, Artificial Sequence
  primer
tcatcctcggaagactgaagg

SEQ ID NO: 115533 - DNA, 21 bp, Artificial Sequence
  primer
gggcttagtgaacagcaagtg

SEQ ID NO: 115534 - DNA, 21 bp, Artificial Sequence
  primer
cttggatcctctggagacacc

SEQ ID NO: 115535 - DNA, 38 bp, Artificial Sequence
  primer
gtaaaacgacggccagtgactgccatgtgctagtccac

SEQ ID NO: 115536 - DNA, 21 bp, Artificial Sequence
  primer
ttgtgagttcatgtggaagcc

SEQ ID NO: 115537 - DNA, 35 bp, Artificial Sequence
  primer
gtaaaacgacggccagtcagaagctgggtgcgaag

SEQ ID NO: 115538 - DNA, 21 bp, Artificial Sequence
  primer
ttggtaagtgaatgccagagc

SEQ ID NO: 115539 - DNA, 44 bp, Artificial Sequence
  primer
gtaaaacgacggccagttgtacttaccattcatagaaacaaggc

SEQ ID NO: 115540 - DNA, 25 bp, Artificial Sequence
  primer
aaagaatgtttgaagggtcagttag

SEQ ID NO: 115541 - DNA, 19 bp, Artificial Sequence
  primer
aagcaaggcgtacggtgag

SEQ ID NO: 115542 - DNA, 36 bp, Artificial Sequence
  primer
gtaaaacgacggccagtacaaagagagccagcgagc

SEQ ID NO: 115543 - DNA, 21 bp, Artificial Sequence
  primer
ttgaccagcatgacatcacag

SEQ ID NO: 115544 - DNA, 21 bp, Artificial Sequence
  primer
cctgggtgacagaacaagact

SEQ ID NO: 115545 - DNA, 25 bp, Artificial Sequence
  primer
ggagaactaatgtgttaactccaaa

SEQ ID NO: 115546 - DNA, 22 bp, Artificial Sequence
  primer
ttccaaccagagacagaaggag

SEQ ID NO: 115547 - DNA, 21 bp, Artificial Sequence
  primer
catggaaggtctattggtccc

SEQ ID NO: 115548 - DNA, 22 bp, Artificial Sequence
  primer
caagggcgaagatttaattagc

SEQ ID NO: 115549 - DNA, 19 bp, Artificial Sequence
  primer
cagctgcagttggtggttg

SEQ ID NO: 115550 - DNA, 38 bp, Artificial Sequence
  primer
gtaaaacgacggccagttaaggcggttgtgagaatttg

SEQ ID NO: 115551 - DNA, 25 bp, Artificial Sequence
  primer
tgaatttcttcaatgatctaccagg

SEQ ID NO: 115552 - DNA, 36 bp, Artificial Sequence
  primer
gtaaaacgacggccagtgatggcctgcccaacttag

SEQ ID NO: 115553 - DNA, 38 bp, Artificial Sequence
  primer
gtaaaacgacggccagtcatctgaagaagcactccagc

SEQ ID NO: 115554 - DNA, 21 bp, Artificial Sequence
  primer
gacaatggcaagagtggtcag

SEQ ID NO: 115555 - DNA, 37 bp, Artificial Sequence
  primer
gtaaaacgacggccagttgaccactctccagctgacc

SEQ ID NO: 115556 - DNA, 20 bp, Artificial Sequence
  primer
aggaactgcacccaaggaag

SEQ ID NO: 115557 - DNA, 21 bp, Artificial Sequence
  primer
aagggaagcctctaggattgg

SEQ ID NO: 115558 - DNA, 21 bp, Artificial Sequence
  primer
tcaaataagcccaagtctccc

SEQ ID NO: 115559 - DNA, 21 bp, Artificial Sequence
  primer
ctattctgggtttgggaggtg

SEQ ID NO: 115560 - DNA, 39 bp, Artificial Sequence
  primer
gtaaaacgacggccagtgctggctgtagaagacacagac

SEQ ID NO: 115561 - DNA, 36 bp, Artificial Sequence
  primer
gtaaaacgacggccagtatgtgatctgcccgctttg

SEQ ID NO: 115562 - DNA, 21 bp, Artificial Sequence
  primer
ccactgcaagctctttgtgac

SEQ ID NO: 115563 - DNA, 38 bp, Artificial Sequence
  primer
gtaaaacgacggccagttctggtcatgggtctttaggg

SEQ ID NO: 115564 - DNA, 38 bp, Artificial Sequence
  primer
gtaaaacgacggccagtgaatagcctggcttccatgag

SEQ ID NO: 115565 - DNA, 38 bp, Artificial Sequence
  primer
gtaaaacgacggccagtaatgaagacctgcttccttgc

SEQ ID NO: 115566 - DNA, 22 bp, Artificial Sequence
  primer
tgatagcatgtgccatatcaga

SEQ ID NO: 115567 - DNA, 21 bp, Artificial Sequence
  primer
ccttgttctctggattcaccc

SEQ ID NO: 115568 - DNA, 38 bp, Artificial Sequence
  primer
gtaaaacgacggccagtcgcagtttctgacagtgaagg

SEQ ID NO: 115569 - DNA, 21 bp, Artificial Sequence
  primer
gcgagctgaatttgagcagag

SEQ ID NO: 115570 - DNA, 21 bp, Artificial Sequence
  primer
gcaaattctggcatgtttgac

SEQ ID NO: 115571 - DNA, 38 bp, Artificial Sequence
  primer
gtaaaacgacggccagtgtgcctgtggagaaagaatgg

SEQ ID NO: 115572 - DNA, 38 bp, Artificial Sequence
  primer
gtaaaacgacggccagtcatggaagatcactgggtcag

SEQ ID NO: 115573 - DNA, 21 bp, Artificial Sequence
  primer
aagtgggaaagcctgtgtcag

SEQ ID NO: 115574 - DNA, 21 bp, Artificial Sequence
  primer
tgctgatactagaaccgctgg

SEQ ID NO: 115575 - DNA, 38 bp, Artificial Sequence
  primer
gtaaaacgacggccagtttgacaggccacttacacacc

SEQ ID NO: 115576 - DNA, 24 bp, Artificial Sequence
  primer
ttccctacctactgtctcaacacc

SEQ ID NO: 115577 - DNA, 22 bp, Artificial Sequence
  primer
caacttggcttgagacagacag

SEQ ID NO: 115578 - DNA, 38 bp, Artificial Sequence
  primer
gtaaaacgacggccagtccaagtaccacctgttctcca

SEQ ID NO: 115579 - DNA, 24 bp, Artificial Sequence
  primer
ttgcagaaacaaagtataaggctg

SEQ ID NO: 115580 - DNA, 42 bp, Artificial Sequence
  primer
gtaaaacgacggccagtgaaagtgtgtcataaatgagtggaa

SEQ ID NO: 115581 - DNA, 21 bp, Artificial Sequence
  primer
ccgattaatcatgccagcttc

SEQ ID NO: 115582 - DNA, 21 bp, Artificial Sequence
  primer
taatgaggctcacacaatggg

SEQ ID NO: 115583 - DNA, 37 bp, Artificial Sequence
  primer
gtaaaacgacggccagtgactcactgcctcatctgcc

SEQ ID NO: 115584 - DNA, 21 bp, Artificial Sequence
  primer
ttgcaaatggaaagtcctgtg

SEQ ID NO: 115585 - DNA, 23 bp, Artificial Sequence
  primer
aaactcttgagcagctagcattt

SEQ ID NO: 115586 - DNA, 21 bp, Artificial Sequence
  primer
agtatttccatgttcaggccc

SEQ ID NO: 115587 - DNA, 21 bp, Artificial Sequence
  primer
tcatttgttggatggatctgg

SEQ ID NO: 115588 - DNA, 38 bp, Artificial Sequence
  primer
gtaaaacgacggccagtgtacttgggtaaggcccagtg

SEQ ID NO: 115589 - DNA, 39 bp, Artificial Sequence
  primer
gtaaaacgacggccagtggatgacagtgacaggtaagcc

SEQ ID NO: 115590 - DNA, 21 bp, Artificial Sequence
  primer
tcaaacctgctgatacttggc

SEQ ID NO: 115591 - DNA, 38 bp, Artificial Sequence
  primer
gtaaaacgacggccagtgggacccaaactaatgctacc

SEQ ID NO: 115592 - DNA, 38 bp, Artificial Sequence
  primer
gtaaaacgacggccagtgtttggtgctaggtcactggc

SEQ ID NO: 115593 - DNA, 21 bp, Artificial Sequence
  primer
gaggagcagaggtagtgcctg

SEQ ID NO: 115594 - DNA, 21 bp, Artificial Sequence
  primer
tttggagaagccttccttgac

SEQ ID NO: 115595 - DNA, 38 bp, Artificial Sequence
  primer
gtaaaacgacggccagtgctgtgaattgtatcccaccc

SEQ ID NO: 115596 - DNA, 21 bp, Artificial Sequence
  primer
ttcctctgagcctttactgcc

SEQ ID NO: 115597 - DNA, 38 bp, Artificial Sequence
  primer
gtaaaacgacggccagtggtctctaagacgccctccag

SEQ ID NO: 115598 - DNA, 21 bp, Artificial Sequence
  primer
ctaccagggaaattcgagctg

SEQ ID NO: 115599 - DNA, 21 bp, Artificial Sequence
  primer
gagatcggagaagctagcagg

SEQ ID NO: 115600 - DNA, 21 bp, Artificial Sequence
  primer
tgcacacaccctactctaccc

SEQ ID NO: 115601 - DNA, 28 bp, Artificial Sequence
  primer
tgtgagaagacatattcacagatttgat

SEQ ID NO: 115602 - DNA, 41 bp, Artificial Sequence
  primer
gtaaaacgacggccagttgttgaacaaggagtagaaaccag

SEQ ID NO: 115603 - DNA, 40 bp, Artificial Sequence
  primer
gtaaaacgacggccagtccacagatctaaatccaaagagc

SEQ ID NO: 115604 - DNA, 26 bp, Artificial Sequence
  primer
tttccagacatagatttatcatttgc

SEQ ID NO: 115605 - DNA, 38 bp, Artificial Sequence
  primer
gtaaaacgacggccagtcagcctgggagacagagtaag

SEQ ID NO: 115606 - DNA, 38 bp, Artificial Sequence
  primer
gtaaaacgacggccagttgtgggaagtggaacacaaac

SEQ ID NO: 115607 - DNA, 39 bp, Artificial Sequence
  primer
gtaaaacgacggccagttgaatcagctattccaagcaaa

SEQ ID NO: 115608 - DNA, 44 bp, Artificial Sequence
  primer
gtaaaacgacggccagtcattagagaagaacatttcaccatttg

SEQ ID NO: 115609 - DNA, 21 bp, Artificial Sequence
  primer
accatttaacggatttggagg

SEQ ID NO: 115610 - DNA, 38 bp, Artificial Sequence
  primer
gtaaaacgacggccagtaacatcgcccattctctcttc

SEQ ID NO: 115611 - DNA, 24 bp, Artificial Sequence
  primer
ccacagccaacaactaatatctcc

SEQ ID NO: 115612 - DNA, 43 bp, Artificial Sequence
  primer
gtaaaacgacggccagtacaatgggttacaatacataaactcg

SEQ ID NO: 115613 - DNA, 26 bp, Artificial Sequence
  primer
cccagcttgactaataatttatgtga

SEQ ID NO: 115614 - DNA, 20 bp, Artificial Sequence
  primer
aagcagcatggtattcccaa

SEQ ID NO: 115615 - DNA, 23 bp, Artificial Sequence
  primer
agaaaggagaacaatgcaatgag

SEQ ID NO: 115616 - DNA, 19 bp, Artificial Sequence
  primer
cacttagcccgtttcctgc

SEQ ID NO: 115617 - DNA, 20 bp, Artificial Sequence
  primer
gtgccatccacaactgatcc

SEQ ID NO: 115618 - DNA, 21 bp, Artificial Sequence
  primer
caagtagggtgcctgacacag

SEQ ID NO: 115619 - DNA, 21 bp, Artificial Sequence
  primer
acaggtgctcagacgaaggac

SEQ ID NO: 115620 - DNA, 21 bp, Artificial Sequence
  primer
cttcccaacagcatccttcac

SEQ ID NO: 115621 - DNA, 21 bp, Artificial Sequence
  primer
tatcgaagattgccttggctc

SEQ ID NO: 115622 - DNA, 37 bp, Artificial Sequence
  primer
gtaaaacgacggccagttcaaccacagatcctctgcc

SEQ ID NO: 115623 - DNA, 37 bp, Artificial Sequence
  primer
gtaaaacgacggccagtactcctcccactcttggctg

SEQ ID NO: 115624 - DNA, 21 bp, Artificial Sequence
  primer
gaatgctggacatggagaagg

SEQ ID NO: 115625 - DNA, 20 bp, Artificial Sequence
  primer
gaacctctcaggagccatcc

SEQ ID NO: 115626 - DNA, 23 bp, Artificial Sequence
  primer
aaagatgggagtgaaattcttgg

SEQ ID NO: 115627 - DNA, 21 bp, Artificial Sequence
  primer
atagggccgtaagagtgggag

SEQ ID NO: 115628 - DNA, 21 bp, Artificial Sequence
  primer
ctaccctcccacttgttctcc

SEQ ID NO: 115629 - DNA, 21 bp, Artificial Sequence
  primer
gactgaaggttggctgagtcc

SEQ ID NO: 115630 - DNA, 21 bp, Artificial Sequence
  primer
aggccaaggaccaagtttagg

SEQ ID NO: 115631 - DNA, 38 bp, Artificial Sequence
  primer
gtaaaacgacggccagtaatagccctggtctctcctcc

SEQ ID NO: 115632 - DNA, 21 bp, Artificial Sequence
  primer
aggacacatgtcatcctcagc

SEQ ID NO: 115633 - DNA, 21 bp, Artificial Sequence
  primer
ggcaaagggagtgctagtgag

SEQ ID NO: 115634 - DNA, 22 bp, Artificial Sequence
  primer
agtctcctcctgctgtcacttc

SEQ ID NO: 115635 - DNA, 36 bp, Artificial Sequence
  primer
gtaaaacgacggccagtctgagtggaggctcttccc

SEQ ID NO: 115636 - DNA, 19 bp, Artificial Sequence
  primer
ccttcccactgcctttgtg

SEQ ID NO: 115637 - DNA, 20 bp, Artificial Sequence
  primer
atttcccagtttcggtcctg

SEQ ID NO: 115638 - DNA, 20 bp, Artificial Sequence
  primer
agaatgggagggaccaagtg

SEQ ID NO: 115639 - DNA, 21 bp, Artificial Sequence
  primer
gggacacagcagtcaggtatc

SEQ ID NO: 115640 - DNA, 21 bp, Artificial Sequence
  primer
cgtgatgccttcatggtagac

SEQ ID NO: 115641 - DNA, 22 bp, Artificial Sequence
  primer
cagctgggtcctagatgaagag

SEQ ID NO: 115642 - DNA, 37 bp, Artificial Sequence
  primer
gtaaaacgacggccagtatgaagcacgcaaccatgac

SEQ ID NO: 115643 - DNA, 22 bp, Artificial Sequence
  primer
tcattaattaacatggccctcc

SEQ ID NO: 115644 - DNA, 18 bp, Artificial Sequence
  primer
tgatctgcccacctcagc

SEQ ID NO: 115645 - DNA, 39 bp, Artificial Sequence
  primer
gtaaaacgacggccagtaactgggactacaggagcacac

SEQ ID NO: 115646 - DNA, 20 bp, Artificial Sequence
  primer
gagtgggctcctaccacctc

SEQ ID NO: 115647 - DNA, 21 bp, Artificial Sequence
  primer
gtgggacaggactaagggttg

SEQ ID NO: 115648 - DNA, 38 bp, Artificial Sequence
  primer
gtaaaacgacggccagttcagactcctggaagcctctc

SEQ ID NO: 115649 - DNA, 35 bp, Artificial Sequence
  primer
gtaaaacgacggccagtgaacccagcaggcaaagg

SEQ ID NO: 115650 - DNA, 21 bp, Artificial Sequence
  primer
aggaggatgcgcagttatttc

SEQ ID NO: 115651 - DNA, 38 bp, Artificial Sequence
  primer
gtaaaacgacggccagtgataagctgattgtgaggccc

SEQ ID NO: 115652 - DNA, 21 bp, Artificial Sequence
  primer
ccaatctgaggaaagaaaggg

SEQ ID NO: 115653 - DNA, 38 bp, Artificial Sequence
  primer
gtaaaacgacggccagtgactcaaacagtctgcccacc

SEQ ID NO: 115654 - DNA, 20 bp, Artificial Sequence
  primer
caccatggtcccaggtacag

SEQ ID NO: 115655 - DNA, 21 bp, Artificial Sequence
  primer
tcctcggagacacaagcctac

SEQ ID NO: 115656 - DNA, 38 bp, Artificial Sequence
  primer
gtaaaacgacggccagttgagatttctggctctcctcc

SEQ ID NO: 115657 - DNA, 38 bp, Artificial Sequence
  primer
gtaaaacgacggccagtttaaaggccagcatcttgttg

SEQ ID NO: 115658 - DNA, 21 bp, Artificial Sequence
  primer
gcctggagttcaacctgtctc

SEQ ID NO: 115659 - DNA, 21 bp, Artificial Sequence
  primer
aagagagagggaaacccaagc

SEQ ID NO: 115660 - DNA, 21 bp, Artificial Sequence
  primer
cctttccctctacgtcaccac

SEQ ID NO: 115661 - DNA, 21 bp, Artificial Sequence
  primer
atacgggcttagagaggaggg

SEQ ID NO: 115662 - DNA, 38 bp, Artificial Sequence
  primer
gtaaaacgacggccagtcaagatgacaggaccatagcc

SEQ ID NO: 115663 - DNA, 37 bp, Artificial Sequence
  primer
gtaaaacgacggccagtgcttccaacccgtagctctc

SEQ ID NO: 115664 - DNA, 22 bp, Artificial Sequence
  primer
cgcatgctagtgagtgttaagg

SEQ ID NO: 115665 - DNA, 39 bp, Artificial Sequence
  primer
gtaaaacgacggccagtaataaagaggagaatggcctgg

SEQ ID NO: 115666 - DNA, 21 bp, Artificial Sequence
  primer
acagggctccacacttcagac

SEQ ID NO: 115667 - DNA, 38 bp, Artificial Sequence
  primer
gtaaaacgacggccagtgcttctggaacttgatttggg

SEQ ID NO: 115668 - DNA, 20 bp, Artificial Sequence
  primer
accatcctacacccaacacg

SEQ ID NO: 115669 - DNA, 21 bp, Artificial Sequence
  primer
cttccaccttacagggctgag

SEQ ID NO: 115670 - DNA, 21 bp, Artificial Sequence
  primer
aggagcctgctgttattcctg

SEQ ID NO: 115671 - DNA, 20 bp, Artificial Sequence
  primer
aaacggaagtgggagagagg

SEQ ID NO: 115672 - DNA, 38 bp, Artificial Sequence
  primer
gtaaaacgacggccagtcacatcagcatcatttcaccc

SEQ ID NO: 115673 - DNA, 22 bp, Artificial Sequence
  primer
ccactgcacccagtcactaaag

SEQ ID NO: 115674 - DNA, 39 bp, Artificial Sequence
  primer
gtaaaacgacggccagtagggtaagacaggaccttctgg

SEQ ID NO: 115675 - DNA, 38 bp, Artificial Sequence
  primer
gtaaaacgacggccagtagaacaatgcctcatccatcc

SEQ ID NO: 115676 - DNA, 19 bp, Artificial Sequence
  primer
ctccttccacctgggtctg

SEQ ID NO: 115677 - DNA, 21 bp, Artificial Sequence
  primer
acagagtgggaaggagacagg

SEQ ID NO: 115678 - DNA, 21 bp, Artificial Sequence
  primer
tttccctgactgctcctcaag

SEQ ID NO: 115679 - DNA, 21 bp, Artificial Sequence
  primer
gttatcgatggcgaaagaagg

SEQ ID NO: 115680 - DNA, 21 bp, Artificial Sequence
  primer
ggtgaaggaacactacgggag

SEQ ID NO: 115681 - DNA, 21 bp, Artificial Sequence
  primer
cttcaggccctagagagcaag

SEQ ID NO: 115682 - DNA, 37 bp, Artificial Sequence
  primer
gtaaaacgacggccagtgggtaccagctaacccatcc

SEQ ID NO: 115683 - DNA, 21 bp, Artificial Sequence
  primer
ctgcccaacacaagcttatcc

SEQ ID NO: 115684 - DNA, 21 bp, Artificial Sequence
  primer
tctgtggctgtgatcttggag

SEQ ID NO: 115685 - DNA, 21 bp, Artificial Sequence
  primer
gcacgaagaacaggattgatg

SEQ ID NO: 115686 - DNA, 19 bp, Artificial Sequence
  primer
aaggtgcagtggccagaag

SEQ ID NO: 115687 - DNA, 21 bp, Artificial Sequence
  primer
ggtctggagtccttgtcacac

SEQ ID NO: 115688 - DNA, 36 bp, Artificial Sequence
  primer
gtaaaacgacggccagtatggaggacaatgggaagg

SEQ ID NO: 115689 - DNA, 20 bp, Artificial Sequence
  primer
ccacatgaccaaagtgggag

SEQ ID NO: 115690 - DNA, 38 bp, Artificial Sequence
  primer
gtaaaacgacggccagtagaagtgggaggtacagggac

SEQ ID NO: 115691 - DNA, 38 bp, Artificial Sequence
  primer
gtaaaacgacggccagtgttaagccctctctctggtgc

SEQ ID NO: 115692 - DNA, 21 bp, Artificial Sequence
  primer
tttgtgtccacggatattccc

SEQ ID NO: 115693 - DNA, 21 bp, Artificial Sequence
  primer
tctcacgtcctctcctcaaac

SEQ ID NO: 115694 - DNA, 39 bp, Artificial Sequence
  primer
gtaaaacgacggccagtcagggatcttctgcttcacatc

SEQ ID NO: 115695 - DNA, 21 bp, Artificial Sequence
  primer
gttagagatgaggtgggcctg

SEQ ID NO: 115696 - DNA, 21 bp, Artificial Sequence
  primer
acctagaaccaggagattggg

SEQ ID NO: 115697 - DNA, 21 bp, Artificial Sequence
  primer
gagaggctgtccactgaaacc

SEQ ID NO: 115698 - DNA, 37 bp, Artificial Sequence
  primer
gtaaaacgacggccagtctgacctgctccctctctcc

SEQ ID NO: 115699 - DNA, 21 bp, Artificial Sequence
  primer
gcccggttgggatagtaatag

SEQ ID NO: 115700 - DNA, 20 bp, Artificial Sequence
  primer
aagtctgagtgaggtccggc

SEQ ID NO: 115701 - DNA, 19 bp, Artificial Sequence
  primer
gacgtttgcagactagcgg

SEQ ID NO: 115702 - DNA, 19 bp, Artificial Sequence
  primer
acccaagcagaaccaccac

SEQ ID NO: 115703 - DNA, 38 bp, Artificial Sequence
  primer
gtaaaacgacggccagtcagaggcagggtcattctagg

SEQ ID NO: 115704 - DNA, 21 bp, Artificial Sequence
  primer
cttagaccgttcagaggctcc

SEQ ID NO: 115705 - DNA, 38 bp, Artificial Sequence
  primer
gtaaaacgacggccagtcttgccatcaatgtccttctg

SEQ ID NO: 115706 - DNA, 22 bp, Artificial Sequence
  primer
tctgcactacggagaggctaac

SEQ ID NO: 115707 - DNA, 38 bp, Artificial Sequence
  primer
gtaaaacgacggccagtaaagtctacggcgaactgctg

SEQ ID NO: 115708 - DNA, 21 bp, Artificial Sequence
  primer
cagggcctgtcctactacctg

SEQ ID NO: 115709 - DNA, 20 bp, Artificial Sequence
  primer
gaggcccacttcatcactcc

SEQ ID NO: 115710 - DNA, 21 bp, Artificial Sequence
  primer
tgtctcctattcagtggtggc

SEQ ID NO: 115711 - DNA, 35 bp, Artificial Sequence
  primer
gtaaaacgacggccagtcagggccaggagtggaag

SEQ ID NO: 115712 - DNA, 21 bp, Artificial Sequence
  primer
acctgggctctacacacacac

SEQ ID NO: 115713 - DNA, 21 bp, Artificial Sequence
  primer
ttactgaggcagagtgggagg

SEQ ID NO: 115714 - DNA, 38 bp, Artificial Sequence
  primer
gtaaaacgacggccagttgtgtacaagcagcttcagcc

SEQ ID NO: 115715 - DNA, 20 bp, Artificial Sequence
  primer
ccacggatctttgacgagac

SEQ ID NO: 115716 - DNA, 38 bp, Artificial Sequence
  primer
gtaaaacgacggccagtcatctgtcagtggatggcttg

SEQ ID NO: 115717 - DNA, 20 bp, Artificial Sequence
  primer
ataagggctcggaaacatgg

SEQ ID NO: 115718 - DNA, 37 bp, Artificial Sequence
  primer
gtaaaacgacggccagtaacatctccaggtcccttgc

SEQ ID NO: 115719 - DNA, 20 bp, Artificial Sequence
  primer
atagggctggttggcatctc

SEQ ID NO: 115720 - DNA, 18 bp, Artificial Sequence
  primer
cgccctctctaagctccg

SEQ ID NO: 115721 - DNA, 20 bp, Artificial Sequence
  primer
aggtccgatgctctggaatc

SEQ ID NO: 115722 - DNA, 38 bp, Artificial Sequence
  primer
gtaaaacgacggccagttagaacagggcaagggcatac

SEQ ID NO: 115723 - DNA, 18 bp, Artificial Sequence
  primer
gattctccgccttgatgc

SEQ ID NO: 115724 - DNA, 43 bp, Artificial Sequence
  primer
gtaaaacgacggccagtgaaagatgcatactacttctcacagg

SEQ ID NO: 115725 - DNA, 26 bp, Artificial Sequence
  primer
ccaataaacaattgtggttagaaatg

SEQ ID NO: 115726 - DNA, 38 bp, Artificial Sequence
  primer
gtaaaacgacggccagttacaatgtccatcgcttctcg

SEQ ID NO: 115727 - DNA, 38 bp, Artificial Sequence
  primer
gtaaaacgacggccagtaaggagaaaggagggctcaac

SEQ ID NO: 115728 - DNA, 20 bp, Artificial Sequence
  primer
tttgcaaagccaccgtatta

SEQ ID NO: 115729 - DNA, 22 bp, Artificial Sequence
  primer
tttagggcaacggattctttag

SEQ ID NO: 115730 - DNA, 23 bp, Artificial Sequence
  primer
tgatgatgtaatgtcaaccaccc

SEQ ID NO: 115731 - DNA, 38 bp, Artificial Sequence
  primer
gtaaaacgacggccagttcacacaaccagacatcatcc

SEQ ID NO: 115732 - DNA, 23 bp, Artificial Sequence
  primer
ttcagttcttcccaagggttaag

SEQ ID NO: 115733 - DNA, 38 bp, Artificial Sequence
  primer
gtaaaacgacggccagttttccttccacccagtgaaac

SEQ ID NO: 115734 - DNA, 41 bp, Artificial Sequence
  primer
gtaaaacgacggccagtaatacagcaaagctattcacaccc

SEQ ID NO: 115735 - DNA, 38 bp, Artificial Sequence
  primer
gtaaaacgacggccagtacatgcagcaggcactaatgt

SEQ ID NO: 115736 - DNA, 22 bp, Artificial Sequence
  primer
tccaatggagtgttaaagggag

SEQ ID NO: 115737 - DNA, 21 bp, Artificial Sequence
  primer
ctggctaaatagggatgaggg

SEQ ID NO: 115738 - DNA, 39 bp, Artificial Sequence
  primer
gtaaaacgacggccagttgggtcttgctacaagttaccc

SEQ ID NO: 115739 - DNA, 21 bp, Artificial Sequence
  primer
ccaacaggaaacaagcctagc

SEQ ID NO: 115740 - DNA, 40 bp, Artificial Sequence
  primer
gtaaaacgacggccagtttcataccattgcaatacacagg

SEQ ID NO: 115741 - DNA, 41 bp, Artificial Sequence
  primer
gtaaaacgacggccagtgatctgaccttagcacagtatccc

SEQ ID NO: 115742 - DNA, 38 bp, Artificial Sequence
  primer
gtaaaacgacggccagttttaatgccatcttccacagg

SEQ ID NO: 115743 - DNA, 21 bp, Artificial Sequence
  primer
ccctgacctacaggaaaccag

SEQ ID NO: 115744 - DNA, 38 bp, Artificial Sequence
  primer
gtaaaacgacggccagttaagtgacaactggtaggcgg

SEQ ID NO: 115745 - DNA, 18 bp, Artificial Sequence
  primer
acctcctgtcctacggcg

SEQ ID NO: 115746 - DNA, 39 bp, Artificial Sequence
  primer
gtaaaacgacggccagttgtgtaagtgttcactgagccg

SEQ ID NO: 115747 - DNA, 38 bp, Artificial Sequence
  primer
gtaaaacgacggccagtacacaggctcacccatagcac

SEQ ID NO: 115748 - DNA, 21 bp, Artificial Sequence
  primer
gacttggaaccaaggatgctg

SEQ ID NO: 115749 - DNA, 21 bp, Artificial Sequence
  primer
ggagaagcaatgacttccagg

SEQ ID NO: 115750 - DNA, 21 bp, Artificial Sequence
  primer
ctgaaacaagtgccagtgagg

SEQ ID NO: 115751 - DNA, 38 bp, Artificial Sequence
  primer
gtaaaacgacggccagtgtggacgagtgatgagtggtg

SEQ ID NO: 115752 - DNA, 21 bp, Artificial Sequence
  primer
cttgagaccttattgcctggg

SEQ ID NO: 115753 - DNA, 38 bp, Artificial Sequence
  primer
gtaaaacgacggccagtggactcagaggtgtgggtgac

SEQ ID NO: 115754 - DNA, 38 bp, Artificial Sequence
  primer
gtaaaacgacggccagtctgggagcctgataccaaacc

SEQ ID NO: 115755 - DNA, 38 bp, Artificial Sequence
  primer
gtaaaacgacggccagttgtcagcatgcacagaacagt

SEQ ID NO: 115756 - DNA, 38 bp, Artificial Sequence
  primer
gtaaaacgacggccagtaatcccaactcagtcacctcc

SEQ ID NO: 115757 - DNA, 38 bp, Artificial Sequence
  primer
gtaaaacgacggccagttagagagagcagatggcctgg

SEQ ID NO: 115758 - DNA, 37 bp, Artificial Sequence
  primer
gtaaaacgacggccagtgcagtgactgagttctgccc

SEQ ID NO: 115759 - DNA, 21 bp, Artificial Sequence
  primer
gtgctcagtgctcagtgaagg

SEQ ID NO: 115760 - DNA, 39 bp, Artificial Sequence
  primer
gtaaaacgacggccagtcatgatttcagagactcctggc

SEQ ID NO: 115761 - DNA, 20 bp, Artificial Sequence
  primer
ctccttagctcgtgatccgc

SEQ ID NO: 115762 - DNA, 19 bp, Artificial Sequence
  primer
aggaccctgcaggacacac

SEQ ID NO: 115763 - DNA, 21 bp, Artificial Sequence
  primer
actgggaggaagtgagacagg

SEQ ID NO: 115764 - DNA, 19 bp, Artificial Sequence
  primer
gagcctggtcccagcatag

SEQ ID NO: 115765 - DNA, 19 bp, Artificial Sequence
  primer
ctggtccatccaccctctg

SEQ ID NO: 115766 - DNA, 38 bp, Artificial Sequence
  primer
gtaaaacgacggccagtattctggagagaaatgtgggc

SEQ ID NO: 115767 - DNA, 22 bp, Artificial Sequence
  primer
ggataccctagaaacccagcac

SEQ ID NO: 115768 - DNA, 21 bp, Artificial Sequence
  primer
gtggcttcccaatcatttctc

SEQ ID NO: 115769 - DNA, 21 bp, Artificial Sequence
  primer
tcattgaagctgcatgtcttg

SEQ ID NO: 115770 - DNA, 39 bp, Artificial Sequence
  primer
gtaaaacgacggccagtcacaatttaaatgggcatgagg

SEQ ID NO: 115771 - DNA, 25 bp, Artificial Sequence
  primer
cctgaatttcattacctgaatatgg

SEQ ID NO: 115772 - DNA, 40 bp, Artificial Sequence
  primer
gtaaaacgacggccagtcctgtttcttactcccacctctg

SEQ ID NO: 115773 - DNA, 38 bp, Artificial Sequence
  primer
gtaaaacgacggccagtcaaagtgagggtcagggaaag

SEQ ID NO: 115774 - DNA, 22 bp, Artificial Sequence
  primer
tgttgggaactaccagacaacc

SEQ ID NO: 115775 - DNA, 21 bp, Artificial Sequence
  primer
ctacgaccatggagctcagac

SEQ ID NO: 115776 - DNA, 40 bp, Artificial Sequence
  primer
gtaaaacgacggccagtaaatttgcacgtgattaatttgc

SEQ ID NO: 115777 - DNA, 21 bp, Artificial Sequence
  primer
gcctacctccatttcttcagg

SEQ ID NO: 115778 - DNA, 40 bp, Artificial Sequence
  primer
gtaaaacgacggccagtgagcagacaaatttcaaggtgtg

SEQ ID NO: 115779 - DNA, 41 bp, Artificial Sequence
  primer
gtaaaacgacggccagtaaactttgtcttgagctgagattg

SEQ ID NO: 115780 - DNA, 39 bp, Artificial Sequence
  primer
gtaaaacgacggccagtcatgcacaggaacactcttgtc

SEQ ID NO: 115781 - DNA, 26 bp, Artificial Sequence
  primer
tgatgaacctgggtaatattatttga

SEQ ID NO: 115782 - DNA, 18 bp, Artificial Sequence
  primer
actacaggcacccgccac

SEQ ID NO: 115783 - DNA, 24 bp, Artificial Sequence
  primer
cgtacgataagatctttgcaattt

SEQ ID NO: 115784 - DNA, 38 bp, Artificial Sequence
  primer
gtaaaacgacggccagtactgatgtccacacatgcgac

SEQ ID NO: 115785 - DNA, 19 bp, Artificial Sequence
  primer
taggcatgagccactgtgc

SEQ ID NO: 115786 - DNA, 20 bp, Artificial Sequence
  primer
ggatctggttgtcgaaacgg

SEQ ID NO: 115787 - DNA, 21 bp, Artificial Sequence
  primer
gaaatccagctcatttggctc

SEQ ID NO: 115788 - DNA, 21 bp, Artificial Sequence
  primer
caaaccggtaaggaaagatgc

SEQ ID NO: 115789 - DNA, 37 bp, Artificial Sequence
  primer
gtaaaacgacggccagttgaagtcagatgaccgaggg

SEQ ID NO: 115790 - DNA, 21 bp, Artificial Sequence
  primer
taaagagggagcactggcttc

SEQ ID NO: 115791 - DNA, 38 bp, Artificial Sequence
  primer
gtaaaacgacggccagtcttagggcctttctcctttcc

SEQ ID NO: 115792 - DNA, 38 bp, Artificial Sequence
  primer
gtaaaacgacggccagtttcatcctgcttctcctccag

SEQ ID NO: 115793 - DNA, 38 bp, Artificial Sequence
  primer
gtaaaacgacggccagtaaagcctgggtaggctgtttc

SEQ ID NO: 115794 - DNA, 21 bp, Artificial Sequence
  primer
agagcagcagcactcacagtc

SEQ ID NO: 115795 - DNA, 21 bp, Artificial Sequence
  primer
caggaaggccacttactcctg

SEQ ID NO: 115796 - DNA, 38 bp, Artificial Sequence
  primer
gtaaaacgacggccagtatgtcatcatcaagtccaggc

SEQ ID NO: 115797 - DNA, 39 bp, Artificial Sequence
  primer
gtaaaacgacggccagtaaagtccctgtcctggtaggag

SEQ ID NO: 115798 - DNA, 38 bp, Artificial Sequence
  primer
gtaaaacgacggccagttacctaccacctgccttgtcc

SEQ ID NO: 115799 - DNA, 19 bp, Artificial Sequence
  primer
cggaggacgtctgaggaag

SEQ ID NO: 115800 - DNA, 42 bp, Artificial Sequence
  primer
gtaaaacgacggccagtcaatatgactgatgaacaggaaagg

SEQ ID NO: 115801 - DNA, 38 bp, Artificial Sequence
  primer
gtaaaacgacggccagtgtggaactgacttgcatgagc

SEQ ID NO: 115802 - DNA, 21 bp, Artificial Sequence
  primer
gagggatgaactagcgacaca

SEQ ID NO: 115803 - DNA, 38 bp, Artificial Sequence
  primer
gtaaaacgacggccagtactccaatagtgggatctggg

SEQ ID NO: 115804 - DNA, 20 bp, Artificial Sequence
  primer
gcctagtccagattcgggtg

SEQ ID NO: 115805 - DNA, 21 bp, Artificial Sequence
  primer
cggatttagggatgcactgag

SEQ ID NO: 115806 - DNA, 21 bp, Artificial Sequence
  primer
tggtacccacaacacatctgc

SEQ ID NO: 115807 - DNA, 38 bp, Artificial Sequence
  primer
gtaaaacgacggccagtatggttaagcaacgcagacag

SEQ ID NO: 115808 - DNA, 20 bp, Artificial Sequence
  primer
ccgcctagtttctagccacc

SEQ ID NO: 115809 - DNA, 21 bp, Artificial Sequence
  primer
caccacccaactattagcagc

SEQ ID NO: 115810 - DNA, 38 bp, Artificial Sequence
  primer
gtaaaacgacggccagtcatcatcatcaggcaatgagg

SEQ ID NO: 115811 - DNA, 21 bp, Artificial Sequence
  primer
cgaggttacaccactgtgctc

SEQ ID NO: 115812 - DNA, 38 bp, Artificial Sequence
  primer
gtaaaacgacggccagtagagaacagaaccgcaagatg

SEQ ID NO: 115813 - DNA, 43 bp, Artificial Sequence
  primer
gtaaaacgacggccagtgacagaacacatatgaagtcacaatc

SEQ ID NO: 115814 - DNA, 37 bp, Artificial Sequence
  primer
gtaaaacgacggccagtcaagtgattcgcccatcttg

SEQ ID NO: 115815 - DNA, 21 bp, Artificial Sequence
  primer
aacccatcttgttcttccacg

SEQ ID NO: 115816 - DNA, 38 bp, Artificial Sequence
  primer
gtaaaacgacggccagtttagtgcccactgttccacac

SEQ ID NO: 115817 - DNA, 38 bp, Artificial Sequence
  primer
gtaaaacgacggccagttgttcactaggcatccagcac

SEQ ID NO: 115818 - DNA, 38 bp, Artificial Sequence
  primer
gtaaaacgacggccagtggcttctagcagttctgcctc

SEQ ID NO: 115819 - DNA, 20 bp, Artificial Sequence
  primer
atgtgattcacccgcttcag

SEQ ID NO: 115820 - DNA, 39 bp, Artificial Sequence
  primer
gtaaaacgacggccagttgctctggcaattactgaaacc

SEQ ID NO: 115821 - DNA, 38 bp, Artificial Sequence
  primer
gtaaaacgacggccagtgagcaggaacacagatgatgg

SEQ ID NO: 115822 - DNA, 21 bp, Artificial Sequence
  primer
gttggcatcaaagatggacag

SEQ ID NO: 115823 - DNA, 21 bp, Artificial Sequence
  primer
gtggctcttatccacgaagtg

SEQ ID NO: 115824 - DNA, 21 bp, Artificial Sequence
  primer
agtgatcctctggcctcagac

SEQ ID NO: 115825 - DNA, 22 bp, Artificial Sequence
  primer
gaacctgctaaggttcccagtc

SEQ ID NO: 115826 - DNA, 21 bp, Artificial Sequence
  primer
ccaaactggcctaaatccaac

SEQ ID NO: 115827 - DNA, 38 bp, Artificial Sequence
  primer
gtaaaacgacggccagtctcagaggactgggacagagg

SEQ ID NO: 115828 - DNA, 21 bp, Artificial Sequence
  primer
ttgagcagccagagtctcaag

SEQ ID NO: 115829 - DNA, 38 bp, Artificial Sequence
  primer
gtaaaacgacggccagttgagacaatgcctaacgaagg

SEQ ID NO: 115830 - DNA, 21 bp, Artificial Sequence
  primer
gaggtcaggttggcgagatac

SEQ ID NO: 115831 - DNA, 21 bp, Artificial Sequence
  primer
tgaccaagtctatgcaggagc

SEQ ID NO: 115832 - DNA, 19 bp, Artificial Sequence
  primer
aaacagaacgcacgtcagc

SEQ ID NO: 115833 - DNA, 21 bp, Artificial Sequence
  primer
cgagcaagagacacaaactgg

SEQ ID NO: 115834 - DNA, 38 bp, Artificial Sequence
  primer
gtaaaacgacggccagtttgtctgtttgccacctatgc

SEQ ID NO: 115835 - DNA, 21 bp, Artificial Sequence
  primer
atgccacaaccttgtttcagg

SEQ ID NO: 115836 - DNA, 21 bp, Artificial Sequence
  primer
caagccgccttgtgtataacc

SEQ ID NO: 115837 - DNA, 38 bp, Artificial Sequence
  primer
gtaaaacgacggccagtaagtccaccttgctctcaagc

SEQ ID NO: 115838 - DNA, 37 bp, Artificial Sequence
  primer
gtaaaacgacggccagtgggttggaagtcgtttcagg

SEQ ID NO: 115839 - DNA, 38 bp, Artificial Sequence
  primer
gtaaaacgacggccagttgagagctgagctgtgagctt

SEQ ID NO: 115840 - DNA, 37 bp, Artificial Sequence
  primer
gtaaaacgacggccagtgacactagcggtggacttgc

SEQ ID NO: 115841 - DNA, 21 bp, Artificial Sequence
  primer
tgctgtaccatcctctcctcc

SEQ ID NO: 115842 - DNA, 21 bp, Artificial Sequence
  primer
gggatcagattccatgtctcc

SEQ ID NO: 115843 - DNA, 38 bp, Artificial Sequence
  primer
gtaaaacgacggccagttcagcagctaccttctctggg

SEQ ID NO: 115844 - DNA, 22 bp, Artificial Sequence
  primer
cacttggctaaacccacacttc

SEQ ID NO: 115845 - DNA, 21 bp, Artificial Sequence
  primer
tcttcccactgagagtgatgg

SEQ ID NO: 115846 - DNA, 20 bp, Artificial Sequence
  primer
cacgaacgtgggtaggtgac

SEQ ID NO: 115847 - DNA, 21 bp, Artificial Sequence
  primer
gccacaaacaccatgtaccac

SEQ ID NO: 115848 - DNA, 20 bp, Artificial Sequence
  primer
gcaggagctgtttccaggac

SEQ ID NO: 115849 - DNA, 22 bp, Artificial Sequence
  primer
cggaaaccagtattaggcagtg

SEQ ID NO: 115850 - DNA, 38 bp, Artificial Sequence
  primer
gtaaaacgacggccagtgtttccctagccacatggaac

SEQ ID NO: 115851 - DNA, 38 bp, Artificial Sequence
  primer
gtaaaacgacggccagtgacaggcccaatatctcaagg

SEQ ID NO: 115852 - DNA, 40 bp, Artificial Sequence
  primer
gtaaaacgacggccagtaaatgtcagaatgtatgcactgg

SEQ ID NO: 115853 - DNA, 38 bp, Artificial Sequence
  primer
gtaaaacgacggccagttcgaatcaaatttcctttggg

SEQ ID NO: 115854 - DNA, 20 bp, Artificial Sequence
  primer
aagatggacctagggcatgg

SEQ ID NO: 115855 - DNA, 23 bp, Artificial Sequence
  primer
catgaagtaggcaattaagggaa

SEQ ID NO: 115856 - DNA, 27 bp, Artificial Sequence
  primer
aggctgagtttcaactactatttatgg

SEQ ID NO: 115857 - DNA, 21 bp, Artificial Sequence
  primer
gagcccatttgtttaggcaag

SEQ ID NO: 115858 - DNA, 27 bp, Artificial Sequence
  primer
tctccataaagcataacaatagttcgt

SEQ ID NO: 115859 - DNA, 39 bp, Artificial Sequence
  primer
gtaaaacgacggccagttccagacctggagtttcaaatg

SEQ ID NO: 115860 - DNA, 40 bp, Artificial Sequence; identical to SEQ ID NO: 115852
  primer

SEQ ID NO: 115861 - DNA, 21 bp, Artificial Sequence
  primer
gaagagcatatcgcagcaatg

SEQ ID NO: 115862 - DNA, 38 bp, Artificial Sequence
  primer
gtaaaacgacggccagtagatggagagaggagagcagg

SEQ ID NO: 115863 - DNA, 38 bp, Artificial Sequence
  primer
gtaaaacgacggccagtagcagaacccacttccatcac

SEQ ID NO: 115864 - DNA, 38 bp, Artificial Sequence
  primer
gtaaaacgacggccagtgacctgcactccaacttccag

SEQ ID NO: 115865 - DNA, 37 bp, Artificial Sequence
  primer
gtaaaacgacggccagtctccctaagcatggctttcc

SEQ ID NO: 115866 - DNA, 21 bp, Artificial Sequence
  primer
ccaggcaacaaacttaccctc

SEQ ID NO: 115867 - DNA, 21 bp, Artificial Sequence
  primer
aggagagcagaatcatggcac

SEQ ID NO: 115868 - DNA, 37 bp, Artificial Sequence
  primer
gtaaaacgacggccagtgtgtcaccctgtacatgccc

SEQ ID NO: 115869 - DNA, 21 bp, Artificial Sequence
  primer
ctacctggaatggaaagaccg

SEQ ID NO: 115870 - DNA, 38 bp, Artificial Sequence
  primer
gtaaaacgacggccagtctcctagacccacacaccctg

SEQ ID NO: 115871 - DNA, 21 bp, Artificial Sequence
  primer
cacttcacacacaagcttccc

SEQ ID NO: 115872 - DNA, 21 bp, Artificial Sequence
  primer
tttgccctttaccctctcaag

SEQ ID NO: 115873 - DNA, 38 bp, Artificial Sequence
  primer
gtaaaacgacggccagtgggcagaaatatccaaggagg

SEQ ID NO: 115874 - DNA, 21 bp, Artificial Sequence
  primer
gctccacaatgcagatgagac

SEQ ID NO: 115875 - DNA, 38 bp, Artificial Sequence
  primer
gtaaaacgacggccagttggcagagcagctagtcattc

SEQ ID NO: 115876 - DNA, 38 bp, Artificial Sequence
  primer
gtaaaacgacggccagtcctgcaccgtctcctaaattg

SEQ ID NO: 115877 - DNA, 21 bp, Artificial Sequence
  primer
aaacaagtcaggtgggaaagg

SEQ ID NO: 115878 - DNA, 21 bp, Artificial Sequence
  primer
tccatcctcatgttcttggtg

SEQ ID NO: 115879 - DNA, 21 bp, Artificial Sequence
  primer
cctccagttgtctgcagtgac

SEQ ID NO: 115880 - DNA, 38 bp, Artificial Sequence
  primer
gtaaaacgacggccagtggtatttgtgagggtgggatg

SEQ ID NO: 115881 - DNA, 21 bp, Artificial Sequence
  primer
gtctcccttcatgctttcctg

SEQ ID NO: 115882 - DNA, 21 bp, Artificial Sequence
  primer
cctccagttgtctgcagtgac

SEQ ID NO: 115883 - DNA, 21 bp, Artificial Sequence
  primer
gactgcaagcaactgaaatcg

SEQ ID NO: 115884 - DNA, 21 bp, Artificial Sequence
  primer
tccaacaatagtccaagagcc

SEQ ID NO: 115885 - DNA, 39 bp, Artificial Sequence
  primer
gtaaaacgacggccagtccacaaccagtagtgcagtgag

SEQ ID NO: 115886 - DNA, 20 bp, Artificial Sequence
  primer
gtccgtggtgcatatggaag

SEQ ID NO: 115887 - DNA, 21 bp, Artificial Sequence
  primer
atacaatcccaggcctttgtc

SEQ ID NO: 115888 - DNA, 38 bp, Artificial Sequence
  primer
gtaaaacgacggccagttgtcatttacctcctccctgg

SEQ ID NO: 115889 - DNA, 36 bp, Artificial Sequence
  primer
gtaaaacgacggccagtggtggctgactctcccaag

SEQ ID NO: 115890 - DNA, 38 bp, Artificial Sequence
  primer
gtaaaacgacggccagtagagaacgttaccttccaggc

SEQ ID NO: 115891 - DNA, 21 bp, Artificial Sequence
  primer
agcaactaagatgcagggtcc

SEQ ID NO: 115892 - DNA, 21 bp, Artificial Sequence
  primer
aaaggacaactggctgtgacc

SEQ ID NO: 115893 - DNA, 38 bp, Artificial Sequence
  primer
gtaaaacgacggccagtggattccattcaacagacagc

SEQ ID NO: 115894 - DNA, 39 bp, Artificial Sequence
  primer
gtaaaacgacggccagtgctccaagaggtacaacgtgtc

SEQ ID NO: 115895 - DNA, 21 bp, Artificial Sequence
  primer
ggtggttgagaaggtggagag

SEQ ID NO: 115896 - DNA, 38 bp, Artificial Sequence
  primer
gtaaaacgacggccagtctacatgtgggtttcagggtg

SEQ ID NO: 115897 - DNA, 38 bp, Artificial Sequence
  primer
gtaaaacgacggccagtactatggagcgtaggcagcac

SEQ ID NO: 115898 - DNA, 22 bp, Artificial Sequence
  primer
ccactgaatccctcactattgg

SEQ ID NO: 115899 - DNA, 21 bp, Artificial Sequence
  primer
accacaggtggtctgaaatcc

SEQ ID NO: 115900 - DNA, 21 bp, Artificial Sequence
  primer
tgggacagaacaatcatgtgg

SEQ ID NO: 115901 - DNA, 38 bp, Artificial Sequence
  primer
gtaaaacgacggccagtgaatgaaggtaagcacctgcc

SEQ ID NO: 115902 - DNA, 21 bp, Artificial Sequence
  primer
ggatgccttcaggaatcacac

SEQ ID NO: 115903 - DNA, 21 bp, Artificial Sequence
  primer
tggtgtgttaaacgcccatac

SEQ ID NO: 115904 - DNA, 38 bp, Artificial Sequence
  primer
gtaaaacgacggccagttcaaatgatcctcccacattg

SEQ ID NO: 115905 - DNA, 38 bp, Artificial Sequence
  primer
gtaaaacgacggccagtgtacaggaagagggcatccag

SEQ ID NO: 115906 - DNA, 21 bp, Artificial Sequence
  primer
ggaaatcatccatttgggaag

SEQ ID NO: 115907 - DNA, 38 bp, Artificial Sequence
  primer
gtaaaacgacggccagtcaggaaagagtgtttgctccc

SEQ ID NO: 115908 - DNA, 21 bp, Artificial Sequence
  primer
ggaagggtacaggacatcagc

SEQ ID NO: 115909 - DNA, 37 bp, Artificial Sequence
  primer
gtaaaacgacggccagtcgtgtgttcaggactcctcc

SEQ ID NO: 115910 - DNA, 21 bp, Artificial Sequence
  primer
tgacaatttgcagtttctgcc

SEQ ID NO: 115911 - DNA, 36 bp, Artificial Sequence
  primer
gtaaaacgacggccagtggactgcacagcagctctc

SEQ ID NO: 115912 - DNA, 37 bp, Artificial Sequence
  primer
gtaaaacgacggccagtcggtgtcttcagggtctcag

SEQ ID NO: 115913 - DNA, 22 bp, Artificial Sequence
  primer
aaacaagaatccgaagaggaaa

SEQ ID NO: 115914 - DNA, 38 bp, Artificial Sequence
  primer
gtaaaacgacggccagtctctcgcacccacctagtctc

SEQ ID NO: 115915 - DNA, 21 bp, Artificial Sequence
  primer
tgctctcgggcttaatattcc

SEQ ID NO: 115916 - DNA, 22 bp, Artificial Sequence
  primer
ggtgtgagttgcattactcagc

SEQ ID NO: 115917 - DNA, 38 bp, Artificial Sequence
  primer
gtaaaacgacggccagttcacatgaaaggctcaaggtg

SEQ ID NO: 115918 - DNA, 21 bp, Artificial Sequence
  primer
actaagcagggtggtcctctg

SEQ ID NO: 115919 - DNA, 21 bp, Artificial Sequence
  primer
tccataagttcaggtgcctcc

SEQ ID NO: 115920 - DNA, 38 bp, Artificial Sequence
  primer
gtaaaacgacggccagtgatgctgggaagagtccattc

SEQ ID NO: 115921 - DNA, 21 bp, Artificial Sequence
  primer
gttactgagggcttggtggag

SEQ ID NO: 115922 - DNA, 21 bp, Artificial Sequence
  primer
tgctgaggctgcaacatttag

SEQ ID NO: 115923 - DNA, 21 bp, Artificial Sequence
  primer
agacggtcaccctcgaataag

SEQ ID NO: 115924 - DNA, 20 bp, Artificial Sequence
  primer
cggcagaatgaagaagggag

SEQ ID NO: 115925 - DNA, 38 bp, Artificial Sequence
  primer
gtaaaacgacggccagtgaggcagaggtaatgacaggc

SEQ ID NO: 115926 - DNA, 21 bp, Artificial Sequence
  primer
cctccactcaaggccatctac

SEQ ID NO: 115927 - DNA, 38 bp, Artificial Sequence
  primer
gtaaaacgacggccagtatgttgtcccagcaaccaatc

SEQ ID NO: 115928 - DNA, 21 bp, Artificial Sequence
  primer
ccaaataagcgtagcacggag

SEQ ID NO: 115929 - DNA, 20 bp, Artificial Sequence
  primer
acacaggttccttgggttcc

SEQ ID NO: 115930 - DNA, 20 bp, Artificial Sequence
  primer
agctccgttgatcctaagcc

SEQ ID NO: 115931 - DNA, 40 bp, Artificial Sequence
  primer
gtaaaacgacggccagtgaaggatcagagatcaggctagg

SEQ ID NO: 115932 - DNA, 20 bp, Artificial Sequence
  primer
tttggtgccatgtgactagg

SEQ ID NO: 115933 - DNA, 20 bp, Artificial Sequence
  primer
ttattgcagcccaagctgac

SEQ ID NO: 115934 - DNA, 21 bp, Artificial Sequence
  primer
agctctcccagattggagttg

SEQ ID NO: 115935 - DNA, 38 bp, Artificial Sequence
  primer
gtaaaacgacggccagtaagaagctggcaccagatcac

SEQ ID NO: 115936 - DNA, 38 bp, Artificial Sequence
  primer
gtaaaacgacggccagttggctttgtataagctgccac

SEQ ID NO: 115937 - DNA, 22 bp, Artificial Sequence
  primer
ttagaggtttctgggtactggc

SEQ ID NO: 115938 - DNA, 39 bp, Artificial Sequence
  primer
gtaaaacgacggccagttgacaaaggaaaccatacctgg

SEQ ID NO: 115939 - DNA, 21 bp, Artificial Sequence
  primer
caccttcccatgtttccaaag

SEQ ID NO: 115940 - DNA, 38 bp, Artificial Sequence
  primer
gtaaaacgacggccagtaatttaaatccaggtcgtcgg

SEQ ID NO: 115941 - DNA, 38 bp, Artificial Sequence
  primer
gtaaaacgacggccagttctccatagccttgtgcactg

SEQ ID NO: 115942 - DNA, 20 bp, Artificial Sequence
  primer
agactggtgatgcaggcaag

SEQ ID NO: 115943 - DNA, 19 bp, Artificial Sequence
  primer
atgtgtgagccaccacgtc

SEQ ID NO: 115944 - DNA, 38 bp, Artificial Sequence
  primer
gtaaaacgacggccagtcccacatatttcacttgcctc

SEQ ID NO: 115945 - DNA, 21 bp, Artificial Sequence
  primer
gctaggacgacagaaatgtgc

SEQ ID NO: 115946 - DNA, 21 bp, Artificial Sequence
  primer
tcactaccctccttcctcacc

SEQ ID NO: 115947 - DNA, 21 bp, Artificial Sequence
  primer
acacaggatcctctctgaggc

SEQ ID NO: 115948 - DNA, 21 bp, Artificial Sequence
  primer
accttaaagaggtgtgggtgc

SEQ ID NO: 115949 - DNA, 38 bp, Artificial Sequence
  primer
gtaaaacgacggccagtaagcttctctgtgctgagtgg

SEQ ID NO: 115950 - DNA, 21 bp, Artificial Sequence
  primer
ggctttggaagtcagatttgg

SEQ ID NO: 115951 - DNA, 20 bp, Artificial Sequence
  primer
ggaagtgaggatgtaggccc

SEQ ID NO: 115952 - DNA, 38 bp, Artificial Sequence
  primer
gtaaaacgacggccagtcgctgagatccatctaggagc

SEQ ID NO: 115953 - DNA, 20 bp, Artificial Sequence
  primer
aagctcgggtcctctctgtc

SEQ ID NO: 115954 - DNA, 21 bp, Artificial Sequence
  primer
ttcctaacactggacactggg

SEQ ID NO: 115955 - DNA, 21 bp, Artificial Sequence
  primer
gaattcacaggtgtacccacg

SEQ ID NO: 115956 - DNA, 20 bp, Artificial Sequence
  primer
ttccattggcatcttcatcc

SEQ ID NO: 115957 - DNA, 38 bp, Artificial Sequence
  primer
gtaaaacgacggccagttctgcctacttccacagttgc

SEQ ID NO: 115958 - DNA, 21 bp, Artificial Sequence
  primer
cagcactcattccaggagttg

SEQ ID NO: 115959 - DNA, 39 bp, Artificial Sequence
  primer
gtaaaacgacggccagtcctggctccataatgtcaaatg

SEQ ID NO: 115960 - DNA, 38 bp, Artificial Sequence
  primer
gtaaaacgacggccagttaggccaatgtggtttcactg

SEQ ID NO: 115961 - DNA, 26 bp, Artificial Sequence
  primer
ccaacagatacagtttaattgtgcag

SEQ ID NO: 115962 - DNA, 38 bp, Artificial Sequence
  primer
gtaaaacgacggccagttggcctatgcagatatgttcc

SEQ ID NO: 115963 - DNA, 24 bp, Artificial Sequence
  primer
gccagacattaaagagatttgcac

SEQ ID NO: 115964 - DNA, 38 bp, Artificial Sequence
  primer
gtaaaacgacggccagtcctgtatgaacagggccagtc

SEQ ID NO: 115965 - DNA, 19 bp, Artificial Sequence
  primer
gccatttaaaggctgtggc

SEQ ID NO: 115966 - DNA, 38 bp, Artificial Sequence
  primer
gtaaaacgacggccagttcctgtgcctcttctttcagg

SEQ ID NO: 115967 - DNA, 38 bp, Artificial Sequence
  primer
gtaaaacgacggccagtagttccatcattaccgaaggc

SEQ ID NO: 115968 - DNA, 21 bp, Artificial Sequence
  primer
atgatgggatcatccttcctg

SEQ ID NO: 115969 - DNA, 21 bp, Artificial Sequence
  primer
tagtctggttgccttctgctc

SEQ ID NO: 115970 - DNA, 22 bp, Artificial Sequence
  primer
tgagctcttcatctttcccttc

SEQ ID NO: 115971 - DNA, 38 bp, Artificial Sequence
  primer
gtaaaacgacggccagtagatctctgcactgctcctcc

SEQ ID NO: 115972 - DNA, 21 bp, Artificial Sequence
  primer
tagccgactttcaatggcttc

SEQ ID NO: 115973 - DNA, 38 bp, Artificial Sequence
  primer
gtaaaacgacggccagttgccggtacctctctaactcc

SEQ ID NO: 115974 - DNA, 21 bp, Artificial Sequence
  primer
ttcatccagggaatccatagc

SEQ ID NO: 115975 - DNA, 21 bp, Artificial Sequence
  primer
aaaggttgccatggtaattgg

SEQ ID NO: 115976 - DNA, 38 bp, Artificial Sequence
  primer
gtaaaacgacggccagtctctgaatatcgcatgcttgg

SEQ ID NO: 115977 - DNA, 20 bp, Artificial Sequence
  primer
gcagcaggaacaccaaattc

SEQ ID NO: 115978 - DNA, 24 bp, Artificial Sequence
  primer
tcaaagaggagttacagatcatgc

SEQ ID NO: 115979 - DNA, 39 bp, Artificial Sequence
  primer
gtaaaacgacggccagttcctcaccctggactatgagat

SEQ ID NO: 115980 - DNA, 21 bp, Artificial Sequence
  primer
ttcgccataattgtgtcttgg

SEQ ID NO: 115981 - DNA, 38 bp, Artificial Sequence
  primer
gtaaaacgacggccagtaacgtctccctttcaagcctc

SEQ ID NO: 115982 - DNA, 38 bp, Artificial Sequence
  primer
gtaaaacgacggccagttagccgactttcaatggcttc

SEQ ID NO: 115983 - DNA, 43 bp, Artificial Sequence
  primer
gtaaaacgacggccagttgagaagaagcagcttgtaatttatc

SEQ ID NO: 115984 - DNA, 38 bp, Artificial Sequence
  primer
gtaaaacgacggccagtgctgttgtggatttcccagag

SEQ ID NO: 115985 - DNA, 21 bp, Artificial Sequence
  primer
tgttcatggctggtctctgtc

SEQ ID NO: 115986 - DNA, 38 bp, Artificial Sequence
  primer
gtaaaacgacggccagttccagaggaatgaggctcttg

SEQ ID NO: 115987 - DNA, 21 bp, Artificial Sequence
  primer
ctccacctacaagcccttacg

SEQ ID NO: 115988 - DNA, 21 bp, Artificial Sequence
  primer
ctatgactgacagcaggtccg

SEQ ID NO: 115989 - DNA, 38 bp, Artificial Sequence
  primer
gtaaaacgacggccagtctggacatcctctaggcttgg

SEQ ID NO: 115990 - DNA, 38 bp, Artificial Sequence
  primer
gtaaaacgacggccagtcaggatggttagtgcaactcg

SEQ ID NO: 115991 - DNA, 21 bp, Artificial Sequence
  primer
ctacctacatgcacagccagc

SEQ ID NO: 115992 - DNA, 38 bp, Artificial Sequence
  primer
gtaaaacgacggccagttccctcttgtagagctggacc

SEQ ID NO: 115993 - DNA, 38 bp, Artificial Sequence
  primer
gtaaaacgacggccagtgatcccgctgtaagtcaggtc

SEQ ID NO: 115994 - DNA, 22 bp, Artificial Sequence
  primer
ggacatagatcaaccaaccagc

SEQ ID NO: 115995 - DNA, 19 bp, Artificial Sequence
  primer
ggtgcctcacctccttcag

SEQ ID NO: 115996 - DNA, 36 bp, Artificial Sequence
  primer
gtaaaacgacggccagtcacagactcagggtcagcc

SEQ ID NO: 115997 - DNA, 21 bp, Artificial Sequence
  primer
ttggatttcttgtccacatcg

SEQ ID NO: 115998 - DNA, 21 bp, Artificial Sequence
  primer
ttgccaatgtcatagtcccag

SEQ ID NO: 115999 - DNA, 21 bp, Artificial Sequence
  primer
agtcactccagtgcttccgag

SEQ ID NO: 116000 - DNA, 21 bp, Artificial Sequence
  primer
tgtaaacgtgcaacacactcg

SEQ ID NO: 116001 - DNA, 19 bp, Artificial Sequence
  primer
ctccgaagagctggtccac

SEQ ID NO: 116002 - DNA, 35 bp, Artificial Sequence
  primer
gtaaaacgacggccagtggttgtgaaccgaggcag

SEQ ID NO: 116003 - DNA, 21 bp, Artificial Sequence
  primer
gaagaattccttcctggtccc

SEQ ID NO: 116004 - DNA, 21 bp, Artificial Sequence
  primer
catcagcttgcttggactctg

SEQ ID NO: 116005 - DNA, 21 bp, Artificial Sequence
  primer
tccagtcctgccttcattagg

SEQ ID NO: 116006 - DNA, 36 bp, Artificial Sequence
  primer
gtaaaacgacggccagttgagtcccatcacaggcag

SEQ ID NO: 116007 - DNA, 37 bp, Artificial Sequence
  primer
gtaaaacgacggccagtagttgccaaggtagcccatc

SEQ ID NO: 116008 - DNA, 21 bp, Artificial Sequence
  primer
ccctacatccgacaagtcctg

SEQ ID NO: 116009 - DNA, 21 bp, Artificial Sequence
  primer
acagagtgctgtgtgaccctc

SEQ ID NO: 116010 - DNA, 20 bp, Artificial Sequence
  primer
gcagtggctctgtgtccaag

SEQ ID NO: 116011 - DNA, 19 bp, Artificial Sequence
  primer
ggacaccctagggagggac

SEQ ID NO: 116012 - DNA, 38 bp, Artificial Sequence
  primer
gtaaaacgacggccagtagcctgagaaggaagcatgac

SEQ ID NO: 116013 - DNA, 21 bp, Artificial Sequence
  primer
atccaagctcgttcacattcc

SEQ ID NO: 116014 - DNA, 39 bp, Artificial Sequence
  primer
gtaaaacgacggccagtaatcacacccattgtcttgacc

SEQ ID NO: 116015 - DNA, 21 bp, Artificial Sequence
  primer
aaatacatggcaggtcgaagg

SEQ ID NO: 116016 - DNA, 25 bp, Artificial Sequence
  primer
aaacatgccattactttgatggtag

SEQ ID NO: 116017 - DNA, 23 bp, Artificial Sequence
  primer
ggacacaaactctgcagctactc

SEQ ID NO: 116018 - DNA, 21 bp, Artificial Sequence
  primer
ttcagtggttctgatcccaag

SEQ ID NO: 116019 - DNA, 21 bp, Artificial Sequence
  primer
atgatttctggaaatgcgctc

SEQ ID NO: 116020 - DNA, 38 bp, Artificial Sequence
  primer
gtaaaacgacggccagttgcattgtccaatcaacattc

SEQ ID NO: 116021 - DNA, 21 bp, Artificial Sequence
  primer
ttgacccaggattcttatggc

SEQ ID NO: 116022 - DNA, 21 bp, Artificial Sequence
  primer
ttctccaccacgatcactgtc

SEQ ID NO: 116023 - DNA, 21 bp, Artificial Sequence
  primer
ccatgatccataaccatgctg

SEQ ID NO: 116024 - DNA, 38 bp, Artificial Sequence
  primer
gtaaaacgacggccagttatgctgtagcagagccaagg

SEQ ID NO: 116025 - DNA, 37 bp, Artificial Sequence
  primer
gtaaaacgacggccagtgggctgaggaggatgttagg

SEQ ID NO: 116026 - DNA, 21 bp, Artificial Sequence
  primer
gcgagttccagaacaactgag

SEQ ID NO: 116027 - DNA, 37 bp, Artificial Sequence
  primer
gtaaaacgacggccagtaaaggttggtccaggtcagg

SEQ ID NO: 116028 - DNA, 21 bp, Artificial Sequence
  primer
cacctccacataggaaggagc

SEQ ID NO: 116029 - DNA, 20 bp, Artificial Sequence
  primer
gcacccaatccctatgtcac

SEQ ID NO: 116030 - DNA, 21 bp, Artificial Sequence
  primer
ttcatcagaaccatctgcacc

SEQ ID NO: 116031 - DNA, 23 bp, Artificial Sequence
  primer
aagataaatggaaggtgtgaggg

SEQ ID NO: 116032 - DNA, 38 bp, Artificial Sequence
  primer
gtaaaacgacggccagttctcagcctagaaagcaaggg

SEQ ID NO: 116033 - DNA, 43 bp, Artificial Sequence
  primer
gtaaaacgacggccagttgacattaacaactatggtatttggg

SEQ ID NO: 116034 - DNA, 21 bp, Artificial Sequence
  primer
aaccctgagcatcccataaac

SEQ ID NO: 116035 - DNA, 21 bp, Artificial Sequence
  primer
aggcaattcagagggtcaatg

SEQ ID NO: 116036 - DNA, 38 bp, Artificial Sequence
  primer
gtaaaacgacggccagtagggtgcaactctaccgagac

SEQ ID NO: 116037 - DNA, 21 bp, Artificial Sequence
  primer
caagagccaaatgtttccatc

SEQ ID NO: 116038 - DNA, 21 bp, Artificial Sequence
  primer
gcttcagtcagaccttcccag

SEQ ID NO: 116039 - DNA, 38 bp, Artificial Sequence
  primer
gtaaaacgacggccagtttaggaacagcgtttgcagag

SEQ ID NO: 116040 - DNA, 38 bp, Artificial Sequence
  primer
gtaaaacgacggccagttacaaattccgtttccgcatc

SEQ ID NO: 116041 - DNA, 38 bp, Artificial Sequence
  primer
gtaaaacgacggccagtaaccaccctttcattacaccg

SEQ ID NO: 116042 - DNA, 38 bp, Artificial Sequence
  primer
gtaaaacgacggccagtagcaactgctgtccaaggaac

SEQ ID NO: 116043 - DNA, 38 bp, Artificial Sequence
  primer
gtaaaacgacggccagtccacgttggcacctttaactc

SEQ ID NO: 116044 - DNA, 21 bp, Artificial Sequence
  primer
tttgtgcttcctgcagtgttc

SEQ ID NO: 116045 - DNA, 38 bp, Artificial Sequence
  primer
gtaaaacgacggccagtagattgttctgcggtggaaag

SEQ ID NO: 116046 - DNA, 21 bp, Artificial Sequence
  primer
tatctgggagctccaccaaac

SEQ ID NO: 116047 - DNA, 21 bp, Artificial Sequence
  primer
aaatctgcattcagcagggac

SEQ ID NO: 116048 - DNA, 39 bp, Artificial Sequence
  primer
gtaaaacgacggccagtcaagctgaaggaacatgcataa

SEQ ID NO: 116049 - DNA, 22 bp, Artificial Sequence
  primer
gaccgctatacacaaggtcagc

SEQ ID NO: 116050 - DNA, 38 bp, Artificial Sequence
  primer
gtaaaacgacggccagtcaccgagctatggcagtgtag

SEQ ID NO: 116051 - DNA, 20 bp, Artificial Sequence
  primer
atcaaccatgagagaggccc

SEQ ID NO: 116052 - DNA, 38 bp, Artificial Sequence
  primer
gtaaaacgacggccagtagaaagagcatttggaaagcg

SEQ ID NO: 116053 - DNA, 21 bp, Artificial Sequence
  primer
catttaatatggctccgtggc

SEQ ID NO: 116054 - DNA, 38 bp, Artificial Sequence
  primer
gtaaaacgacggccagtcgatgctctcaagaacaggtg

SEQ ID NO: 116055 - DNA, 38 bp, Artificial Sequence
  primer
gtaaaacgacggccagtgattgctcaatgagaccaggg

SEQ ID NO: 116056 - DNA, 38 bp, Artificial Sequence
  primer
gtaaaacgacggccagttgtgtgtgctgagcctagacc

SEQ ID NO: 116057 - DNA, 38 bp, Artificial Sequence
  primer
gtaaaacgacggccagttctggaagcttgtccctgttc

SEQ ID NO: 116058 - DNA, 38 bp, Artificial Sequence
  primer
gtaaaacgacggccagtcggagggtctcagtttcaaag

SEQ ID NO: 116059 - DNA, 21 bp, Artificial Sequence
  primer
ttgggacatttgaggttaggg

SEQ ID NO: 116060 - DNA, 21 bp, Artificial Sequence
  primer
ctaaactcccaccctctgctg

SEQ ID NO: 116061 - DNA, 39 bp, Artificial Sequence
  primer
gtaaaacgacggccagttcactagcccgaagtaaacctg

SEQ ID NO: 116062 - DNA, 21 bp, Artificial Sequence
  primer
cacaggcccaatgaggtaaac

SEQ ID NO: 116063 - DNA, 38 bp, Artificial Sequence
  primer
gtaaaacgacggccagtttgtcttggcatctgcttctg

SEQ ID NO: 116064 - DNA, 26 bp, Artificial Sequence
  primer
cggccttctaaccttagtctttattc

SEQ ID NO: 116065 - DNA, 36 bp, Artificial Sequence
  primer
gtaaaacgacggccagtaaaggctgcctctccttgg

SEQ ID NO: 116066 - DNA, 38 bp, Artificial Sequence
  primer
gtaaaacgacggccagtccatattcatcaccacatgcc

SEQ ID NO: 116067 - DNA, 44 bp, Artificial Sequence
  primer
gtaaaacgacggccagttcattaaactatctgtgacaagcaaac

SEQ ID NO: 116068 - DNA, 20 bp, Artificial Sequence
  primer
ctgggcctgctttctctagg

SEQ ID NO: 116069 - DNA, 20 bp, Artificial Sequence
  primer
caggtggaggctaaagggac

SEQ ID NO: 116070 - DNA, 21 bp, Artificial Sequence
  primer
taggctgctccttaagccaag

SEQ ID NO: 116071 - DNA, 39 bp, Artificial Sequence
  primer
gtaaaacgacggccagttgggaattcaagaaccaatcag

SEQ ID NO: 116072 - DNA, 21 bp, Artificial Sequence
  primer
gctctctgccagtaggcaatc

SEQ ID NO: 116073 - DNA, 39 bp, Artificial Sequence
  primer
gtaaaacgacggccagtgggttcttgaaatgaaacatgg

SEQ ID NO: 116074 - DNA, 22 bp, Artificial Sequence
  primer
tgtgacgtcaacctaacaatcc

SEQ ID NO: 116075 - DNA, 22 bp, Artificial Sequence
  primer
cttgaaatctgcacttggtttg

SEQ ID NO: 116076 - DNA, 38 bp, Artificial Sequence
  primer
gtaaaacgacggccagttcccagaggtacagcaaacct

SEQ ID NO: 116077 - DNA, 25 bp, Artificial Sequence
  primer
tcaaacaaacattagtcaacctgtg

SEQ ID NO: 116078 - DNA, 38 bp, Artificial Sequence
  primer
gtaaaacgacggccagtttccctccctactgagaaacg

SEQ ID NO: 116079 - DNA, 37 bp, Artificial Sequence
  primer
gtaaaacgacggccagtcttgccctgaggacagtagg

SEQ ID NO: 116080 - DNA, 38 bp, Artificial Sequence
  primer
gtaaaacgacggccagtcactgcagcctcaactcaaac

SEQ ID NO: 116081 - DNA, 44 bp, Artificial Sequence
  primer
gtaaaacgacggccagtccttgaatgctatatggaaatgtattg

SEQ ID NO: 116082 - DNA, 21 bp, Artificial Sequence
  primer
gaccatccagttagcctttgc

SEQ ID NO: 116083 - DNA, 21 bp, Artificial Sequence
  primer
tttggatgggatttctgaatg

SEQ ID NO: 116084 - DNA, 44 bp, Artificial Sequence
  primer
gtaaaacgacggccagtttcgctgaaatctggtatctactaatc

SEQ ID NO: 116085 - DNA, 37 bp, Artificial Sequence
  primer
gtaaaacgacggccagttcaccacctctgccactttc

SEQ ID NO: 116086 - DNA, 21 bp, Artificial Sequence
  primer
cacccacacctctccattcac

SEQ ID NO: 116087 - DNA, 37 bp, Artificial Sequence
  primer
gtaaaacgacggccagttactttgcatcgtcaggcag

SEQ ID NO: 116088 - DNA, 21 bp, Artificial Sequence
  primer
tgattcctactgatccagccc

SEQ ID NO: 116089 - DNA, 26 bp, Artificial Sequence
  primer
cccagataaaggtgttctattctcac

SEQ ID NO: 116090 - DNA, 21 bp, Artificial Sequence
  primer
tttggtgtgatggattcttgg

SEQ ID NO: 116091 - DNA, 20 bp, Artificial Sequence
  primer
ttcctgtccttctggcattg

SEQ ID NO: 116092 - DNA, 21 bp, Artificial Sequence
  primer
atgtgcaaattcagaggttgg

SEQ ID NO: 116093 - DNA, 23 bp, Artificial Sequence
  primer
cttactggagcggagaaagacag

SEQ ID NO: 116094 - DNA, 21 bp, Artificial Sequence
  primer
cagtagactgcaccgttctgc

SEQ ID NO: 116095 - DNA, 23 bp, Artificial Sequence
  primer
tgcaccttgtggaaatgtttaag

SEQ ID NO: 116096 - DNA, 38 bp, Artificial Sequence; identical to SEQ ID NO: 14996
  primer

SEQ ID NO: 116097 - DNA, 38 bp, Artificial Sequence
  primer
gtaaaacgacggccagtaaagctggccacagatcattc

SEQ ID NO: 116098 - DNA, 21 bp, Artificial Sequence
  primer
cctccttcaactgacagcctc

SEQ ID NO: 116099 - DNA, 38 bp, Artificial Sequence
  primer
gtaaaacgacggccagtactcctaggctcaagcgatcc

SEQ ID NO: 116100 - DNA, 27 bp, Artificial Sequence
  primer
agtcacttattaatgaagaagcaggtc

SEQ ID NO: 116101 - DNA, 38 bp, Artificial Sequence
  primer
gtaaaacgacggccagttgtttcaccaatttgctgtgg

SEQ ID NO: 116102 - DNA, 41 bp, Artificial Sequence
  primer
gtaaaacgacggccagtttacctgttcaaagcaaacaagac

SEQ ID NO: 116103 - DNA, 37 bp, Artificial Sequence
  primer
gtaaaacgacggccagttaaattgcatgtcacggagg

SEQ ID NO: 116104 - DNA, 22 bp, Artificial Sequence
  primer
ttgccctcaaacttcagtaacc

SEQ ID NO: 116105 - DNA, 42 bp, Artificial Sequence
  primer
gtaaaacgacggccagttcagaatatatagcatgctcaaagc

SEQ ID NO: 116106 - DNA, 38 bp, Artificial Sequence
  primer
gtaaaacgacggccagtaaacacagtgctgaatgctgg

SEQ ID NO: 116107 - DNA, 38 bp, Artificial Sequence
  primer
gtaaaacgacggccagtctgaatgcactggttaccctc

SEQ ID NO: 116108 - DNA, 21 bp, Artificial Sequence
  primer
tggctcttccctagagcattc

SEQ ID NO: 116109 - DNA, 38 bp, Artificial Sequence
  primer
gtaaaacgacggccagtccacacagactgcaatgttcc

SEQ ID NO: 116110 - DNA, 19 bp, Artificial Sequence
  primer
caattgggcattgaagcaa

SEQ ID NO: 116111 - DNA, 21 bp, Artificial Sequence
  primer
ccaagcaggccagtaacactc

SEQ ID NO: 116112 - DNA, 23 bp, Artificial Sequence
  primer
gggagaagtggtctatagcttgg

SEQ ID NO: 116113 - DNA, 21 bp, Artificial Sequence
  primer
tttatctttgttgtggacccg

SEQ ID NO: 116114 - DNA, 38 bp, Artificial Sequence
  primer
gtaaaacgacggccagttcctgagctcaagcaatcctc

SEQ ID NO: 116115 - DNA, 21 bp, Artificial Sequence
  primer
cctaatgttgccactctgctg

SEQ ID NO: 116116 - DNA, 39 bp, Artificial Sequence
  primer
gtaaaacgacggccagttgcaacagcagttctaagaggg

SEQ ID NO: 116117 - DNA, 21 bp, Artificial Sequence
  primer
gggtttcatgtatcagctggg

SEQ ID NO: 116118 - DNA, 38 bp, Artificial Sequence
  primer
gtaaaacgacggccagtgaagtgaaacgggagggtatc

SEQ ID NO: 116119 - DNA, 37 bp, Artificial Sequence
  primer
gtaaaacgacggccagtatttgcatggcatggctatc

SEQ ID NO: 116120 - DNA, 23 bp, Artificial Sequence
  primer
cctagctgagcctctagaaagtg

SEQ ID NO: 116121 - DNA, 23 bp, Artificial Sequence
  primer
tgaatctcagccatcaatacaac

SEQ ID NO: 116122 - DNA, 26 bp, Artificial Sequence
  primer
gaaattaccttcaagttgactggttc

SEQ ID NO: 116123 - DNA, 25 bp, Artificial Sequence
  primer
tcaatgcttatataatgctccttgc

SEQ ID NO: 116124 - DNA, 22 bp, Artificial Sequence
  primer
caaagcaggaggatcacttgag

SEQ ID NO: 116125 - DNA, 25 bp, Artificial Sequence
  primer
gacagataagaagagtggaaaccag

SEQ ID NO: 116126 - DNA, 41 bp, Artificial Sequence
  primer
gtaaaacgacggccagttggactacaggtgagtacagatgc

SEQ ID NO: 116127 - DNA, 36 bp, Artificial Sequence
  primer
gtaaaacgacggccagttgtgcatgtgctctgcctc

SEQ ID NO: 116128 - DNA, 40 bp, Artificial Sequence
  primer
gtaaaacgacggccagttctgtctgcaggtaaagaacctc

SEQ ID NO: 116129 - DNA, 40 bp, Artificial Sequence
  primer
gtaaaacgacggccagtcaccggtatcccaatgttaactc

SEQ ID NO: 116130 - DNA, 23 bp, Artificial Sequence
  primer
aaatcatttcccatcatattggc

SEQ ID NO: 116131 - DNA, 38 bp, Artificial Sequence
  primer
gtaaaacgacggccagtagaactgccatccacatttcc

SEQ ID NO: 116132 - DNA, 40 bp, Artificial Sequence
  primer
gtaaaacgacggccagttgtatatgtcaccacaatgaccc

SEQ ID NO: 116133 - DNA, 38 bp, Artificial Sequence
  primer
gtaaaacgacggccagttgtattggactggattgggtg

SEQ ID NO: 116134 - DNA, 42 bp, Artificial Sequence
  primer
gtaaaacgacggccagtgttgtgaatccaatgacagtttaag

SEQ ID NO: 116135 - DNA, 37 bp, Artificial Sequence
  primer
gtaaaacgacggccagtggacataacacatcgcagcc

SEQ ID NO: 116136 - DNA, 21 bp, Artificial Sequence
  primer
tgaataaggccaagggtgaac

SEQ ID NO: 116137 - DNA, 20 bp, Artificial Sequence
  primer
ggaacatctttgccctggac

SEQ ID NO: 116138 - DNA, 43 bp, Artificial Sequence
  primer
gtaaaacgacggccagtttcagaggacacaagtcgaataatag

SEQ ID NO: 116139 - DNA, 38 bp, Artificial Sequence
  primer
gtaaaacgacggccagtccctgctgttgtaataggcac

SEQ ID NO: 116140 - DNA, 39 bp, Artificial Sequence
  primer
gtaaaacgacggccagttggtatctctgactccaaagcc

SEQ ID NO: 116141 - DNA, 35 bp, Artificial Sequence
  primer
gtaaaacgacggccagtctggccagctgctactcg

SEQ ID NO: 116142 - DNA, 39 bp, Artificial Sequence
  primer
gtaaaacgacggccagtcaattaatgcttgctctgtgcc

SEQ ID NO: 116143 - DNA, 38 bp, Artificial Sequence
  primer
gtaaaacgacggccagtgctcaaagtgccattaggagg

SEQ ID NO: 116144 - DNA, 21 bp, Artificial Sequence
  primer
cctctgacactggagcacaaa

SEQ ID NO: 116145 - DNA, 39 bp, Artificial Sequence
  primer
gtaaaacgacggccagttggtgtcgagaagaaacactcc

SEQ ID NO: 116146 - DNA, 21 bp, Artificial Sequence
  primer
tcggaaatgtctaaggttccc

SEQ ID NO: 116147 - DNA, 38 bp, Artificial Sequence
  primer
gtaaaacgacggccagtaccacacagttgcaggttcag

SEQ ID NO: 116148 - DNA, 21 bp, Artificial Sequence
  primer
agagatggattccctttgctg

SEQ ID NO: 116149 - DNA, 38 bp, Artificial Sequence
  primer
gtaaaacgacggccagtaaccctcagctcttccaagtc

SEQ ID NO: 116150 - DNA, 21 bp, Artificial Sequence
  primer
ctgctatgtcaccaaagccac

SEQ ID NO: 116151 - DNA, 21 bp, Artificial Sequence
  primer
ggtcacaaccttctcccaaac

SEQ ID NO: 116152 - DNA, 21 bp, Artificial Sequence
  primer
tcaggtcatagacagatgccc

SEQ ID NO: 116153 - DNA, 38 bp, Artificial Sequence
  primer
gtaaaacgacggccagtcacattctcactcaggtgcag

SEQ ID NO: 116154 - DNA, 21 bp, Artificial Sequence
  primer
ttcctcaaggcacacaatgtc

SEQ ID NO: 116155 - DNA, 37 bp, Artificial Sequence
  primer
gtaaaacgacggccagtcggttgggaaacaaatcatc

SEQ ID NO: 116156 - DNA, 21 bp, Artificial Sequence
  primer
tcagggaactggtaccctctg

SEQ ID NO: 116157 - DNA, 38 bp, Artificial Sequence
  primer
gtaaaacgacggccagttggtctgtctggaaggaaagc

SEQ ID NO: 116158 - DNA, 21 bp, Artificial Sequence
  primer
ccttcagggacagaaatggag

SEQ ID NO: 116159 - DNA, 38 bp, Artificial Sequence
  primer
gtaaaacgacggccagtaaaggcacctggcatttagac

SEQ ID NO: 116160 - DNA, 21 bp, Artificial Sequence
  primer
gctacttccctgttcagtgcc

SEQ ID NO: 116161 - DNA, 38 bp, Artificial Sequence
  primer
gtaaaacgacggccagtagctggaaatagcattgtggg

SEQ ID NO: 116162 - DNA, 20 bp, Artificial Sequence
  primer
ctggtgtgtgtgattctggg

SEQ ID NO: 116163 - DNA, 21 bp, Artificial Sequence
  primer
tgggtctgcaagcacatacac

SEQ ID NO: 116164 - DNA, 38 bp, Artificial Sequence
  primer
gtaaaacgacggccagtgcaactcgggagagtgtatcc

SEQ ID NO: 116165 - DNA, 21 bp, Artificial Sequence
  primer
tcaaatgaactggcaagaagc

SEQ ID NO: 116166 - DNA, 21 bp, Artificial Sequence
  primer
tgcaaccataaggcattcatc

SEQ ID NO: 116167 - DNA, 24 bp, Artificial Sequence
  primer
tctctaggttggattcttgagctg

SEQ ID NO: 116168 - DNA, 38 bp, Artificial Sequence
  primer
gtaaaacgacggccagtcaggccttcactggatacaag

SEQ ID NO: 116169 - DNA, 20 bp, Artificial Sequence
  primer
aaataccacaccggaaaccc

SEQ ID NO: 116170 - DNA, 21 bp, Artificial Sequence
  primer
ttgcatttatgcagaccaagg

SEQ ID NO: 116171 - DNA, 39 bp, Artificial Sequence
  primer
gtaaaacgacggccagtgactccagctgctatccatcag

SEQ ID NO: 116172 - DNA, 21 bp, Artificial Sequence
  primer
caatgctgggagttcaatgtg

SEQ ID NO: 116173 - DNA, 38 bp, Artificial Sequence
  primer
gtaaaacgacggccagttctctgacagggacagaagcc

SEQ ID NO: 116174 - DNA, 38 bp, Artificial Sequence
  primer
gtaaaacgacggccagtagcttcgattggtgaggagtc

SEQ ID NO: 116175 - DNA, 38 bp, Artificial Sequence
  primer
gtaaaacgacggccagtagactgggacagcttctgtgg

SEQ ID NO: 116176 - DNA, 22 bp, Artificial Sequence
  primer
ttgtaccacatatcacggatgg

SEQ ID NO: 116177 - DNA, 21 bp, Artificial Sequence
  primer
gttatttcatgctcccactgc

SEQ ID NO: 116178 - DNA, 38 bp, Artificial Sequence
  primer
gtaaaacgacggccagtagcctctcaatgaagctcagg

SEQ ID NO: 116179 - DNA, 21 bp, Artificial Sequence
  primer
gccactccagagagaaatgtg

SEQ ID NO: 116180 - DNA, 21 bp, Artificial Sequence
  primer
aacaatcgtgagacccaaagc

SEQ ID NO: 116181 - DNA, 21 bp, Artificial Sequence
  primer
aacacagagggcctgaatgtc

SEQ ID NO: 116182 - DNA, 21 bp, Artificial Sequence
  primer
aagagtttggagacacagggc

SEQ ID NO: 116183 - DNA, 21 bp, Artificial Sequence
  primer
acagagctgaggatggattgg

SEQ ID NO: 116184 - DNA, 21 bp, Artificial Sequence
  primer
agggagatgctcagtacagcc

SEQ ID NO: 116185 - DNA, 21 bp, Artificial Sequence
  primer
tgctggtgattatgatgaggg

SEQ ID NO: 116186 - DNA, 21 bp, Artificial Sequence
  primer
tctaaggtgggtctttgtggg

SEQ ID NO: 116187 - DNA, 21 bp, Artificial Sequence
  primer
aattggagggtgattctttgc

SEQ ID NO: 116188 - DNA, 21 bp, Artificial Sequence
  primer
agttccttcccattctgaggc

SEQ ID NO: 116189 - DNA, 38 bp, Artificial Sequence
  primer
gtaaaacgacggccagtattctgggactcacacagcag

SEQ ID NO: 116190 - DNA, 20 bp, Artificial Sequence
  primer
acatgtacctgcatctgccc

SEQ ID NO: 116191 - DNA, 21 bp, Artificial Sequence
  primer
ataatcttggcaccatccagc

SEQ ID NO: 116192 - DNA, 38 bp, Artificial Sequence
  primer
gtaaaacgacggccagtaccaagtttccaggagggttc

SEQ ID NO: 116193 - DNA, 22 bp, Artificial Sequence
  primer
gggaaaggtagaagggatgttg

SEQ ID NO: 116194 - DNA, 21 bp, Artificial Sequence
  primer
caggaagcccatatctggaag

SEQ ID NO: 116195 - DNA, 38 bp, Artificial Sequence
  primer
gtaaaacgacggccagtagacacagttcccatccatcc

SEQ ID NO: 116196 - DNA, 21 bp, Artificial Sequence
  primer
actcagggcctcctgactatg

SEQ ID NO: 116197 - DNA, 38 bp, Artificial Sequence
  primer
gtaaaacgacggccagtgggacagtctcccactctctg

SEQ ID NO: 116198 - DNA, 18 bp, Artificial Sequence
  primer
ctctgcacagagacccgc

SEQ ID NO: 116199 - DNA, 24 bp, Artificial Sequence
  primer
tcatgtgactaattatggctccag

SEQ ID NO: 116200 - DNA, 40 bp, Artificial Sequence
  primer
gtaaaacgacggccagtggaaagaatcattgtggctactg

SEQ ID NO: 116201 - DNA, 42 bp, Artificial Sequence
  primer
gtaaaacgacggccagtaacggaaatcataacagtctctcag

SEQ ID NO: 116202 - DNA, 38 bp, Artificial Sequence
  primer
gtaaaacgacggccagttgtgttctcctcaggttgaaa

SEQ ID NO: 116203 - DNA, 21 bp, Artificial Sequence
  primer
aggtgcaaactccctgaagac

SEQ ID NO: 116204 - DNA, 23 bp, Artificial Sequence
  primer
tgcctagataatttggtaagccc

SEQ ID NO: 116205 - DNA, 21 bp, Artificial Sequence
  primer
ggtgtctgtcatttcctggtg

SEQ ID NO: 116206 - DNA, 37 bp, Artificial Sequence
  primer
gtaaaacgacggccagtgatggccagagatgcctatg

SEQ ID NO: 116207 - DNA, 38 bp, Artificial Sequence
  primer
gtaaaacgacggccagtaatgcttgtttccagggtgac

SEQ ID NO: 116208 - DNA, 39 bp, Artificial Sequence
  primer
gtaaaacgacggccagtaaacaaagctcatgcacaagac

SEQ ID NO: 116209 - DNA, 21 bp, Artificial Sequence
  primer
ctgtgtccacaaggtttgagc

SEQ ID NO: 116210 - DNA, 21 bp, Artificial Sequence
  primer
aatacagcagccaatctgcac

SEQ ID NO: 116211 - DNA, 38 bp, Artificial Sequence
  primer
gtaaaacgacggccagttccatagcacagttcaccacc

SEQ ID NO: 116212 - DNA, 38 bp, Artificial Sequence
  primer
gtaaaacgacggccagtcttgaagagaatgggcctctg

SEQ ID NO: 116213 - DNA, 25 bp, Artificial Sequence
  primer
tccacttaattctgttcaagagagg

SEQ ID NO: 116214 - DNA, 21 bp, Artificial Sequence
  primer
cacagatgtcccactgtcacc

SEQ ID NO: 116215 - DNA, 38 bp, Artificial Sequence
  primer
gtaaaacgacggccagttcacatgcgctagtagtgtgg

SEQ ID NO: 116216 - DNA, 38 bp, Artificial Sequence
  primer
gtaaaacgacggccagtcagtctcagacggttattggc

SEQ ID NO: 116217 - DNA, 21 bp, Artificial Sequence
  primer
ctggttggttgcttggtcttc

SEQ ID NO: 116218 - DNA, 22 bp, Artificial Sequence
  primer
ggagatggacagagttctggtg

SEQ ID NO: 116219 - DNA, 22 bp, Artificial Sequence
  primer
tgtggatcaagacagtcattcc

SEQ ID NO: 116220 - DNA, 37 bp, Artificial Sequence
  primer
gtaaaacgacggccagtgcagggcttcttcatctctg

SEQ ID NO: 116221 - DNA, 39 bp, Artificial Sequence
  primer
gtaaaacgacggccagtcgttgaggaaactgatcctttg

SEQ ID NO: 116222 - DNA, 37 bp, Artificial Sequence
  primer
gtaaaacgacggccagtctttgttggtctgcctctgg

SEQ ID NO: 116223 - DNA, 38 bp, Artificial Sequence
  primer
gtaaaacgacggccagtaggtggtgggatggtaagatg

SEQ ID NO: 116224 - DNA, 38 bp, Artificial Sequence
  primer
gtaaaacgacggccagtgtaaagcagggctggtgaatc

SEQ ID NO: 116225 - DNA, 21 bp, Artificial Sequence
  primer
ccctggcctttatttgtcttg

SEQ ID NO: 116226 - DNA, 21 bp, Artificial Sequence
  primer
ttggctaccaacacttccaac

SEQ ID NO: 116227 - DNA, 38 bp, Artificial Sequence
  primer
gtaaaacgacggccagtgctgagaaccttgtggacctc

SEQ ID NO: 116228 - DNA, 21 bp, Artificial Sequence
  primer
tgctacaccatccatctgagg

SEQ ID NO: 116229 - DNA, 21 bp, Artificial Sequence
  primer
cccactagaatcatggcttgg

SEQ ID NO: 116230 - DNA, 21 bp, Artificial Sequence
  primer
aacctctaaagcctgccagtg

SEQ ID NO: 116231 - DNA, 38 bp, Artificial Sequence
  primer
gtaaaacgacggccagtaccttctccagcaggctattg

SEQ ID NO: 116232 - DNA, 21 bp, Artificial Sequence
  primer
tggcacccaatatcacaacag

SEQ ID NO: 116233 - DNA, 38 bp, Artificial Sequence
  primer
gtaaaacgacggccagtgcctgcagccatgtattgtag

SEQ ID NO: 116234 - DNA, 20 bp, Artificial Sequence
  primer
accagcctgaagcctttctc

SEQ ID NO: 116235 - DNA, 21 bp, Artificial Sequence
  primer
accctatggtgtcaagatgcc

SEQ ID NO: 116236 - DNA, 38 bp, Artificial Sequence
  primer
gtaaaacgacggccagtatgccacttctcccttctctg

SEQ ID NO: 116237 - DNA, 22 bp, Artificial Sequence
  primer
aacagagtctgaagttggcagc

SEQ ID NO: 116238 - DNA, 38 bp, Artificial Sequence
  primer
gtaaaacgacggccagtacctgtatggttggcaatgtg

SEQ ID NO: 116239 - DNA, 21 bp, Artificial Sequence
  primer
tgagttcccaaggaagttgag

SEQ ID NO: 116240 - DNA, 22 bp, Artificial Sequence
  primer
caaagatcctagcacagggttg

SEQ ID NO: 116241 - DNA, 38 bp, Artificial Sequence
  primer
gtaaaacgacggccagtagggcatgtagggaaggctac

SEQ ID NO: 116242 - DNA, 21 bp, Artificial Sequence
  primer
aacaaggccactctgtgaacc

SEQ ID NO: 116243 - DNA, 21 bp, Artificial Sequence
  primer
ctttggtttgtggcgtaggtc

SEQ ID NO: 116244 - DNA, 38 bp, Artificial Sequence
  primer
gtaaaacgacggccagttttgctgtgtgcatgggtaag

SEQ ID NO: 116245 - DNA, 38 bp, Artificial Sequence
  primer
gtaaaacgacggccagtaacggcagctttctagctctg

SEQ ID NO: 116246 - DNA, 21 bp, Artificial Sequence
  primer
cacagatgagaggaagccgag

SEQ ID NO: 116247 - DNA, 21 bp, Artificial Sequence
  primer
gggatcttacagcggaatgag

SEQ ID NO: 116248 - DNA, 38 bp, Artificial Sequence
  primer
gtaaaacgacggccagtcagctggtactcagggacaag

SEQ ID NO: 116249 - DNA, 21 bp, Artificial Sequence
  primer
tccagttcctcctgtagaccc

SEQ ID NO: 116250 - DNA, 21 bp, Artificial Sequence
  primer
ctcagtctcttcacgcagcag

SEQ ID NO: 116251 - DNA, 21 bp, Artificial Sequence
  primer
gttctctcctgagtgcaagcc

SEQ ID NO: 116252 - DNA, 35 bp, Artificial Sequence
  primer
gtaaaacgacggccagtgcgatgccaggattaggc

SEQ ID NO: 116253 - DNA, 38 bp, Artificial Sequence
  primer
gtaaaacgacggccagtatgcctttccattagccaaac

SEQ ID NO: 116254 - DNA, 38 bp, Artificial Sequence
  primer
gtaaaacgacggccagtgcatttcaactgagtcccaac

SEQ ID NO: 116255 - DNA, 20 bp, Artificial Sequence
  primer
tccaccaacggtcttaatgc

SEQ ID NO: 116256 - DNA, 38 bp, Artificial Sequence
  primer
gtaaaacgacggccagtaggagtcctggagacttgcag

SEQ ID NO: 116257 - DNA, 21 bp, Artificial Sequence
  primer
gcttccagtgacattaccacg

SEQ ID NO: 116258 - DNA, 21 bp, Artificial Sequence
  primer
ctgtactgagggcatggtcac

SEQ ID NO: 116259 - DNA, 22 bp, Artificial Sequence
  primer
gaaacatccaaagaacaggcag

SEQ ID NO: 116260 - DNA, 22 bp, Artificial Sequence
  primer
aatcctgggaggtgatattcag

SEQ ID NO: 116261 - DNA, 22 bp, Artificial Sequence
  primer
gattcttggattcaaatctggc

SEQ ID NO: 116262 - DNA, 38 bp, Artificial Sequence
  primer
gtaaaacgacggccagtcacctaaagtagcattcgccc

SEQ ID NO: 116263 - DNA, 22 bp, Artificial Sequence
  primer
tttccttcccaaacagacaaac

SEQ ID NO: 116264 - DNA, 38 bp, Artificial Sequence
  primer
gtaaaacgacggccagtatgtgaatgcttcaaagctgg

SEQ ID NO: 116265 - DNA, 38 bp, Artificial Sequence
  primer
gtaaaacgacggccagtttcagcatgaagactgcgttt

SEQ ID NO: 116266 - DNA, 39 bp, Artificial Sequence
  primer
gtaaaacgacggccagttgcctaagaccaccagaaacag

SEQ ID NO: 116267 - DNA, 21 bp, Artificial Sequence
  primer
aggtttacccaaacatccacc

SEQ ID NO: 116268 - DNA, 37 bp, Artificial Sequence
  primer
gtaaaacgacggccagtactgggtcacatttgcttcc

SEQ ID NO: 116269 - DNA, 21 bp, Artificial Sequence
  primer
agcacatgtttctgaaccagc

SEQ ID NO: 116270 - DNA, 38 bp, Artificial Sequence
  primer
gtaaaacgacggccagttctgaaccagcctcatgaaag

SEQ ID NO: 116271 - DNA, 38 bp, Artificial Sequence
  primer
gtaaaacgacggccagtcctatatcgcctcttctgctg

SEQ ID NO: 116272 - DNA, 21 bp, Artificial Sequence
  primer
agactaccctggcaaagtccc

SEQ ID NO: 116273 - DNA, 38 bp, Artificial Sequence
  primer
gtaaaacgacggccagtgctcagctggtacacagaagg

SEQ ID NO: 116274 - DNA, 19 bp, Artificial Sequence
  primer
gcatctgctgaccaatggc

SEQ ID NO: 116275 - DNA, 38 bp, Artificial Sequence
  primer
gtaaaacgacggccagtaagtgggtctcagaggcttcc

SEQ ID NO: 116276 - DNA, 38 bp, Artificial Sequence
  primer
gtaaaacgacggccagttaacatcaagccacctgcaac

SEQ ID NO: 116277 - DNA, 38 bp, Artificial Sequence
  primer
gtaaaacgacggccagttgagcagatctgtggatgagg

SEQ ID NO: 116278 - DNA, 22 bp, Artificial Sequence
  primer
tgggaacagaacttctcaatgc

SEQ ID NO: 116279 - DNA, 40 bp, Artificial Sequence
  primer
gtaaaacgacggccagttcctttgtcataaacagggatca

SEQ ID NO: 116280 - DNA, 38 bp, Artificial Sequence
  primer
gtaaaacgacggccagttgtgtgatttccagttatgcg

SEQ ID NO: 116281 - DNA, 38 bp, Artificial Sequence
  primer
gtaaaacgacggccagtggtttcacatggtgtcactgg

SEQ ID NO: 116282 - DNA, 40 bp, Artificial Sequence
  primer
gtaaaacgacggccagttggagttgaatccagaagttcac

SEQ ID NO: 116283 - DNA, 21 bp, Artificial Sequence
  primer
ctccacaaagacaaagccctc

SEQ ID NO: 116284 - DNA, 23 bp, Artificial Sequence
  primer
caaattaacagctctgaaccagc

SEQ ID NO: 116285 - DNA, 39 bp, Artificial Sequence
  primer
gtaaaacgacggccagtcctgcagctcactatgcttctc

SEQ ID NO: 116286 - DNA, 40 bp, Artificial Sequence
  primer
gtaaaacgacggccagtgaaatgcttgagtctttccactc

SEQ ID NO: 116287 - DNA, 38 bp, Artificial Sequence
  primer
gtaaaacgacggccagtaggaggtgggcattcataaac

SEQ ID NO: 116288 - DNA, 43 bp, Artificial Sequence
  primer
gtaaaacgacggccagtaagttaatttcatagaaccacactgg

SEQ ID NO: 116289 - DNA, 23 bp, Artificial Sequence
  primer
tcggaaattatttaaacaaggca

SEQ ID NO: 116290 - DNA, 38 bp, Artificial Sequence
  primer
gtaaaacgacggccagtaccttgcatggaaatgctctg

SEQ ID NO: 116291 - DNA, 37 bp, Artificial Sequence
  primer
gtaaaacgacggccagttatttaccaagggctgtgcc

SEQ ID NO: 116292 - DNA, 38 bp, Artificial Sequence
  primer
gtaaaacgacggccagtgccttggtaatagcggtcaag

SEQ ID NO: 116293 - DNA, 38 bp, Artificial Sequence
  primer
gtaaaacgacggccagttatgtttgcgtgctgatatgg

SEQ ID NO: 116294 - DNA, 38 bp, Artificial Sequence
  primer
gtaaaacgacggccagtagaccactgatgcaggaaacc

SEQ ID NO: 116295 - DNA, 38 bp, Artificial Sequence
  primer
gtaaaacgacggccagtaaagcctcgcaaatagcagac

SEQ ID NO: 116296 - DNA, 21 bp, Artificial Sequence
  primer
gcctcgcgggttagttatttc

SEQ ID NO: 116297 - DNA, 38 bp, Artificial Sequence
  primer
gtaaaacgacggccagtatgtcgtcttaaagcgatggg

SEQ ID NO: 116298 - DNA, 38 bp, Artificial Sequence
  primer
gtaaaacgacggccagtatcagcatggtagtggtgctg

SEQ ID NO: 116299 - DNA, 38 bp, Artificial Sequence
  primer
gtaaaacgacggccagtagctggattggtctgacactg

SEQ ID NO: 116300 - DNA, 21 bp, Artificial Sequence
  primer
agagcactgctttccacacag

SEQ ID NO: 116301 - DNA, 22 bp, Artificial Sequence
  primer
aggaattcaggacaaactggag

SEQ ID NO: 116302 - DNA, 39 bp, Artificial Sequence
  primer
gtaaaacgacggccagtcagaagggaaagtccagtgttg

SEQ ID NO: 116303 - DNA, 21 bp, Artificial Sequence
  primer
ccattcatcgaaggagctgag

SEQ ID NO: 116304 - DNA, 21 bp, Artificial Sequence
  primer
ctggagaggactcctaccgtc

SEQ ID NO: 116305 - DNA, 38 bp, Artificial Sequence
  primer
gtaaaacgacggccagtgtgctcatgtactcagctggc

SEQ ID NO: 116306 - DNA, 39 bp, Artificial Sequence
  primer
gtaaaacgacggccagtggcactgaggtcagagaatttg

SEQ ID NO: 116307 - DNA, 38 bp, Artificial Sequence
  primer
gtaaaacgacggccagtcctggcctgagatgagagaac

SEQ ID NO: 116308 - DNA, 21 bp, Artificial Sequence
  primer
atcagcctttgtgtgatccag

SEQ ID NO: 116309 - DNA, 20 bp, Artificial Sequence
  primer
tcacctccatgggatcagag

SEQ ID NO: 116310 - DNA, 38 bp, Artificial Sequence
  primer
gtaaaacgacggccagttgcctcatcctttctgctatg

SEQ ID NO: 116311 - DNA, 21 bp, Artificial Sequence
  primer
ctcaaatctggcaaagagctg

SEQ ID NO: 116312 - DNA, 38 bp, Artificial Sequence
  primer
gtaaaacgacggccagtggtgggttattcctgctaggc

SEQ ID NO: 116313 - DNA, 19 bp, Artificial Sequence
  primer
agggcagctggatcatttg

SEQ ID NO: 116314 - DNA, 21 bp, Artificial Sequence
  primer
cctcttcaatgggagtccaac

SEQ ID NO: 116315 - DNA, 21 bp, Artificial Sequence
  primer
ataaagggcaggagtccaagg

SEQ ID NO: 116316 - DNA, 21 bp, Artificial Sequence
  primer
tgtttgtgtcccaggtgtctc

SEQ ID NO: 116317 - DNA, 38 bp, Artificial Sequence
  primer
gtaaaacgacggccagtacccatcctgatgcaaagaag

SEQ ID NO: 116318 - DNA, 38 bp, Artificial Sequence
  primer
gtaaaacgacggccagtatccatcacgtcaaccacaag

SEQ ID NO: 116319 - DNA, 21 bp, Artificial Sequence
  primer
cagcttcacaagatggctgtc

SEQ ID NO: 116320 - DNA, 38 bp, Artificial Sequence
  primer
gtaaaacgacggccagtagccctctgggtttctagatg

SEQ ID NO: 116321 - DNA, 38 bp, Artificial Sequence
  primer
gtaaaacgacggccagttatagtccagccctgtgagcc

SEQ ID NO: 116322 - DNA, 27 bp, Artificial Sequence
  primer
gggtacaactagtttaaatcaaagagg

SEQ ID NO: 116323 - DNA, 30 bp, Artificial Sequence
  primer
tctaatagtacttctaggaattcagcctaa

SEQ ID NO: 116324 - DNA, 20 bp, Artificial Sequence
  primer
ctgatccagaatgaaggccc

SEQ ID NO: 116325 - DNA, 22 bp, Artificial Sequence
  primer
agccctgcagttctgaaataag

SEQ ID NO: 116326 - DNA, 20 bp, Artificial Sequence
  primer
atggccaattctaagcggtc

SEQ ID NO: 116327 - DNA, 21 bp, Artificial Sequence
  primer
aagtgcaaacctctctcaggg

SEQ ID NO: 116328 - DNA, 39 bp, Artificial Sequence
  primer
gtaaaacgacggccagtaagtgttagctgcagaaatggg

SEQ ID NO: 116329 - DNA, 38 bp, Artificial Sequence
  primer
gtaaaacgacggccagtcggagctggaaactacctgag

SEQ ID NO: 116330 - DNA, 38 bp, Artificial Sequence
  primer
gtaaaacgacggccagtatagtctcaagccactggccc

SEQ ID NO: 116331 - DNA, 21 bp, Artificial Sequence
  primer
ctgtggacagccacatagcac

SEQ ID NO: 116332 - DNA, 21 bp, Artificial Sequence
  primer
gatgatgggtttgaggcaaag

SEQ ID NO: 116333 - DNA, 21 bp, Artificial Sequence
  primer
tttggaggacagtgtgacagg

SEQ ID NO: 116334 - DNA, 41 bp, Artificial Sequence
  primer
gtaaaacgacggccagtgacttacctcactaacaacatggg

SEQ ID NO: 116335 - DNA, 21 bp, Artificial Sequence
  primer
ttctgatagcatgtggatgcc

SEQ ID NO: 116336 - DNA, 21 bp, Artificial Sequence
  primer
ctgggttgcactgtctgactc

SEQ ID NO: 116337 - DNA, 20 bp, Artificial Sequence
  primer
gggtggccctagtgactctg

SEQ ID NO: 116338 - DNA, 38 bp, Artificial Sequence
  primer
gtaaaacgacggccagtgacttaggaagacaccggctc

SEQ ID NO: 116339 - DNA, 38 bp, Artificial Sequence
  primer
gtaaaacgacggccagtgggtctctcaaagcagcaaac

SEQ ID NO: 116340 - DNA, 21 bp, Artificial Sequence
  primer
ggttcataagtcgtgctctgc

SEQ ID NO: 116341 - DNA, 37 bp, Artificial Sequence
  primer
gtaaaacgacggccagtgagacagtgccctgaacctg

SEQ ID NO: 116342 - DNA, 21 bp, Artificial Sequence
  primer
cccactccacttccagagatg

SEQ ID NO: 116343 - DNA, 37 bp, Artificial Sequence
  primer
gtaaaacgacggccagtctaacaccctgttgcccatc

SEQ ID NO: 116344 - DNA, 21 bp, Artificial Sequence
  primer
gtgtctgcagagaagggactg

SEQ ID NO: 116345 - DNA, 21 bp, Artificial Sequence
  primer
attcctggcttcgagcaatac

SEQ ID NO: 116346 - DNA, 39 bp, Artificial Sequence
  primer
gtaaaacgacggccagtcgatctcttgacttcgtgatcc

SEQ ID NO: 116347 - DNA, 21 bp, Artificial Sequence
  primer
gcagagggaattcaacaaagg

SEQ ID NO: 116348 - DNA, 19 bp, Artificial Sequence
  primer
caaatggcacagagggagg

SEQ ID NO: 116349 - DNA, 38 bp, Artificial Sequence
  primer
gtaaaacgacggccagtctcagctttaagaaggctccg

SEQ ID NO: 116350 - DNA, 38 bp, Artificial Sequence
  primer
gtaaaacgacggccagtcagcctcactatttccatgcc

SEQ ID NO: 116351 - DNA, 21 bp, Artificial Sequence
  primer
aggagtgatgcgtggctaaag

SEQ ID NO: 116352 - DNA, 38 bp, Artificial Sequence
  primer
gtaaaacgacggccagttggtgatatgcctgggtacag

SEQ ID NO: 116353 - DNA, 38 bp, Artificial Sequence
  primer
gtaaaacgacggccagtagttacaaactgcccagatgc

SEQ ID NO: 116354 - DNA, 38 bp, Artificial Sequence
  primer
gtaaaacgacggccagtagaatcgactgcagtgacagg

SEQ ID NO: 116355 - DNA, 19 bp, Artificial Sequence
  primer
cccatggaatgaggacacc

SEQ ID NO: 116356 - DNA, 18 bp, Artificial Sequence
  primer
gtcacggaggcagaacgg

SEQ ID NO: 116357 - DNA, 21 bp, Artificial Sequence
  primer
tagaacctaggccaaggaagc

SEQ ID NO: 116358 - DNA, 39 bp, Artificial Sequence
  primer
gtaaaacgacggccagttgtcctgcctattccagacaag

SEQ ID NO: 116359 - DNA, 21 bp, Artificial Sequence
  primer
ctacatggcaccttcaaagcc

SEQ ID NO: 116360 - DNA, 38 bp, Artificial Sequence
  primer
gtaaaacgacggccagtcaaggctgtttgggtcatttc

SEQ ID NO: 116361 - DNA, 21 bp, Artificial Sequence
  primer
gtgcccaataaacactgatcg

SEQ ID NO: 116362 - DNA, 21 bp, Artificial Sequence
  primer
cttaaggattggagactcggg

SEQ ID NO: 116363 - DNA, 21 bp, Artificial Sequence
  primer
gagtccgagttcaggtcgaag

SEQ ID NO: 116364 - DNA, 21 bp, Artificial Sequence
  primer
cagccctgattacccttcttg

SEQ ID NO: 116365 - DNA, 36 bp, Artificial Sequence
  primer
gtaaaacgacggccagtcaggcgcagcttctctagc

SEQ ID NO: 116366 - DNA, 21 bp, Artificial Sequence
  primer
ggaccaagatgaaacagggag

SEQ ID NO: 116367 - DNA, 21 bp, Artificial Sequence
  primer
ctgagtcgctcagcctcctac

SEQ ID NO: 116368 - DNA, 21 bp, Artificial Sequence
  primer
atggtcatcgttgggtctctg

SEQ ID NO: 116369 - DNA, 21 bp, Artificial Sequence
  primer
gtgtgtccttggcttagggag

SEQ ID NO: 116370 - DNA, 21 bp, Artificial Sequence
  primer
atgacctgggagagtggattc

SEQ ID NO: 116371 - DNA, 21 bp, Artificial Sequence
  primer
tgggagcctctacctctcttc

SEQ ID NO: 116372 - DNA, 21 bp, Artificial Sequence
  primer
agacactgggagacagaaggg

SEQ ID NO: 116373 - DNA, 21 bp, Artificial Sequence
  primer
aggattgacaggaaggaaggc

SEQ ID NO: 116374 - DNA, 21 bp, Artificial Sequence
  primer
tcggcaactgttactcaatcg

SEQ ID NO: 116375 - DNA, 21 bp, Artificial Sequence
  primer
aatggccagagaggtaaatgg

SEQ ID NO: 116376 - DNA, 21 bp, Artificial Sequence
  primer
acctcaaatgatccatccagc

SEQ ID NO: 116377 - DNA, 21 bp, Artificial Sequence
  primer
ttcatcaacagattcttcgcc

SEQ ID NO: 116378 - DNA, 21 bp, Artificial Sequence
  primer
ccaaagtgttgggattacagg

SEQ ID NO: 116379 - DNA, 21 bp, Artificial Sequence
  primer
agtggattcctggtcttacgg

SEQ ID NO: 116380 - DNA, 38 bp, Artificial Sequence
  primer
gtaaaacgacggccagtaggttgagggtcacgtagtgc

SEQ ID NO: 116381 - DNA, 20 bp, Artificial Sequence
  primer
gggacagagatgagggaacc

SEQ ID NO: 116382 - DNA, 21 bp, Artificial Sequence
  primer
tcagtgtcatggccacatagc

SEQ ID NO: 116383 - DNA, 22 bp, Artificial Sequence
  primer
tcccacctttactatcctgtgc

SEQ ID NO: 116384 - DNA, 21 bp, Artificial Sequence
  primer
agatgaatcctggccaatctg

SEQ ID NO: 116385 - DNA, 38 bp, Artificial Sequence
  primer
gtaaaacgacggccagttctgcacaaagacagtccacc

SEQ ID NO: 116386 - DNA, 38 bp, Artificial Sequence
  primer
gtaaaacgacggccagtaaagtaagctagggatggccc

SEQ ID NO: 116387 - DNA, 38 bp, Artificial Sequence; identical to SEQ ID NO: 80038
  primer

SEQ ID NO: 116388 - DNA, 40 bp, Artificial Sequence
  primer
gtaaaacgacggccagtgggattatggagtcagagaccac

SEQ ID NO: 116389 - DNA, 18 bp, Artificial Sequence
  primer
aggcatgagccactgtgc

SEQ ID NO: 116390 - DNA, 21 bp, Artificial Sequence
  primer
ccctcactccctgtatggttg

SEQ ID NO: 116391 - DNA, 38 bp, Artificial Sequence
  primer
gtaaaacgacggccagtatgtgcaggttgaacatcagg

SEQ ID NO: 116392 - DNA, 21 bp, Artificial Sequence
  primer
cctcacttgcctctgttaggg

SEQ ID NO: 116393 - DNA, 38 bp, Artificial Sequence
  primer
gtaaaacgacggccagttcctctagcacgttggatgag

SEQ ID NO: 116394 - DNA, 20 bp, Artificial Sequence
  primer
gctggaagggtctaggaagc

SEQ ID NO: 116395 - DNA, 38 bp, Artificial Sequence
  primer
gtaaaacgacggccagtaagagaagggtcaaggtcagc

SEQ ID NO: 116396 - DNA, 20 bp, Artificial Sequence
  primer
ctggtgttcactgatggctg

SEQ ID NO: 116397 - DNA, 21 bp, Artificial Sequence
  primer
agaactcctggagacacaggg

SEQ ID NO: 116398 - DNA, 39 bp, Artificial Sequence
  primer
gtaaaacgacggccagtcccagagaaagaggatttgagg

SEQ ID NO: 116399 - DNA, 21 bp, Artificial Sequence
  primer
gtctgggtccctgtgtctacc

SEQ ID NO: 116400 - DNA, 37 bp, Artificial Sequence
  primer
gtaaaacgacggccagtatttgttgtgatgccggaag

SEQ ID NO: 116401 - DNA, 21 bp, Artificial Sequence
  primer
gagatcagatgggcagagagc

SEQ ID NO: 116402 - DNA, 21 bp, Artificial Sequence
  primer
catcctgtacctgtcctggtc

SEQ ID NO: 116403 - DNA, 20 bp, Artificial Sequence
  primer
aagggaggaagcatcagtgc

SEQ ID NO: 116404 - DNA, 38 bp, Artificial Sequence
  primer
gtaaaacgacggccagtcaacatcctctcccaactcag

SEQ ID NO: 116405 - DNA, 39 bp, Artificial Sequence
  primer
gtaaaacgacggccagttgcgtaacaggaaatgatgatg

SEQ ID NO: 116406 - DNA, 25 bp, Artificial Sequence
  primer
aaacattacgaatctgccttaatcc

SEQ ID NO: 116407 - DNA, 39 bp, Artificial Sequence
  primer
gtaaaacgacggccagttcaaagatactacaggcccagc

SEQ ID NO: 116408 - DNA, 23 bp, Artificial Sequence
  primer
cagctgtttcagttgctttatcc

SEQ ID NO: 116409 - DNA, 23 bp, Artificial Sequence
  primer
gcacagtaggctcagcttcatac

SEQ ID NO: 116410 - DNA, 26 bp, Artificial Sequence
  primer
cattcctattgttatgtactgcttgc

SEQ ID NO: 116411 - DNA, 21 bp, Artificial Sequence
  primer
ggtcaaatctttgcccttgaa

SEQ ID NO: 116412 - DNA, 39 bp, Artificial Sequence
  primer
gtaaaacgacggccagtggaagataggaagtgggcaaac

SEQ ID NO: 116413 - DNA, 18 bp, Artificial Sequence
  primer
caagatcgtgccactgcc

SEQ ID NO: 116414 - DNA, 38 bp, Artificial Sequence
  primer
gtaaaacgacggccagtgtttcttggaatcaccctccc

SEQ ID NO: 116415 - DNA, 21 bp, Artificial Sequence
  primer
agaagactgacaggcattggg

SEQ ID NO: 116416 - DNA, 44 bp, Artificial Sequence
  primer
gtaaaacgacggccagtaattgtgcggtaagagatagagttaag

SEQ ID NO: 116417 - DNA, 19 bp, Artificial Sequence
  primer
ttgcagttgccaaccaaag

SEQ ID NO: 116418 - DNA, 21 bp, Artificial Sequence
  primer
tgatgtcagccttgaatttgg

SEQ ID NO: 116419 - DNA, 18 bp, Artificial Sequence
  primer
cccaggaaacggaggttg

SEQ ID NO: 116420 - DNA, 23 bp, Artificial Sequence
  primer
aagaaatggcaagagtttgcttg

SEQ ID NO: 116421 - DNA, 41 bp, Artificial Sequence
  primer
gtaaaacgacggccagtcagcaatgacagatttatgacagg

SEQ ID NO: 116422 - DNA, 30 bp, Artificial Sequence
  primer
aatttcagtatatgcctatagaacacattt

SEQ ID NO: 116423 - DNA, 40 bp, Artificial Sequence
  primer
gtaaaacgacggccagtttgcctttgaataaatggatcac

SEQ ID NO: 116424 - DNA, 45 bp, Artificial Sequence
  primer
gtaaaacgacggccagttgtacaattccttcctaattcctaactt

SEQ ID NO: 116425 - DNA, 21 bp, Artificial Sequence
  primer
aaaggcatcagacaagcaatg

SEQ ID NO: 116426 - DNA, 21 bp, Artificial Sequence
  primer
gctagcttatgcaaccatccc

SEQ ID NO: 116427 - DNA, 39 bp, Artificial Sequence
  primer
gtaaaacgacggccagttcaaccatttctgtgtcctgtg

SEQ ID NO: 116428 - DNA, 37 bp, Artificial Sequence
  primer
gtaaaacgacggccagtgccacagtccttgtgtcctg

SEQ ID NO: 116429 - DNA, 25 bp, Artificial Sequence
  primer
caaagcactaagaactgagcctatc

SEQ ID NO: 116430 - DNA, 25 bp, Artificial Sequence
  primer
aaatgtgagtggaatacttctgtcc

SEQ ID NO: 116431 - DNA, 25 bp, Artificial Sequence
  primer
tttgatcagcacacaattcttattt

SEQ ID NO: 116432 - DNA, 26 bp, Artificial Sequence
  primer
acaatcatctcatatatttaagggca

SEQ ID NO: 116433 - DNA, 24 bp, Artificial Sequence
  primer
aaaggtcaagctattcattcgttc

SEQ ID NO: 116434 - DNA, 42 bp, Artificial Sequence
  primer
gtaaaacgacggccagtaaagcataggattgacattgaagac

SEQ ID NO: 116435 - DNA, 38 bp, Artificial Sequence
  primer
gtaaaacgacggccagtacgagaagttcttcctccaaa

SEQ ID NO: 116436 - DNA, 38 bp, Artificial Sequence
  primer
gtaaaacgacggccagttcagaatgcttggaacgaaac

SEQ ID NO: 116437 - DNA, 21 bp, Artificial Sequence
  primer
ggcagcagtagagaggcaaag

SEQ ID NO: 116438 - DNA, 21 bp, Artificial Sequence
  primer
tgcacacaattggagatttgg

SEQ ID NO: 116439 - DNA, 41 bp, Artificial Sequence
  primer
gtaaaacgacggccagtaaatgaaataaatgatcctccagc

SEQ ID NO: 116440 - DNA, 20 bp, Artificial Sequence
  primer
acaggcagatctcttgagcc

SEQ ID NO: 116441 - DNA, 19 bp, Artificial Sequence
  primer
caccttgtgaagcattggc

SEQ ID NO: 116442 - DNA, 38 bp, Artificial Sequence
  primer
gtaaaacgacggccagtatcctcccgtcttagcctctc

SEQ ID NO: 116443 - DNA, 22 bp, Artificial Sequence
  primer
tttgctttggccatgaactatc

SEQ ID NO: 116444 - DNA, 38 bp, Artificial Sequence
  primer
gtaaaacgacggccagtggatttccatgcactgcctac

SEQ ID NO: 116445 - DNA, 27 bp, Artificial Sequence
  primer
tctggcttactaaatgattagatctgg

SEQ ID NO: 116446 - DNA, 23 bp, Artificial Sequence
  primer
tgtcgaaataggtgattctgtcc

SEQ ID NO: 116447 - DNA, 44 bp, Artificial Sequence
  primer
gtaaaacgacggccagtatatcttctggtacatctgagttgttg

SEQ ID NO: 116448 - DNA, 38 bp, Artificial Sequence
  primer
gtaaaacgacggccagtacaggcagtagagaaggcaga

SEQ ID NO: 116449 - DNA, 37 bp, Artificial Sequence
  primer
gtaaaacgacggccagtgcaggtgtaagccactgtgc

SEQ ID NO: 116450 - DNA, 36 bp, Artificial Sequence
  primer
gtaaaacgacggccagtttcggatgacagatgctcg

SEQ ID NO: 116451 - DNA, 38 bp, Artificial Sequence
  primer
gtaaaacgacggccagtcatagccatgattctcaagcg

SEQ ID NO: 116452 - DNA, 38 bp, Artificial Sequence
  primer
gtaaaacgacggccagtttcagattgaaggcatctccc

SEQ ID NO: 116453 - DNA, 22 bp, Artificial Sequence
  primer
gggaactgtgtgtgtgatatgg

SEQ ID NO: 116454 - DNA, 36 bp, Artificial Sequence
  primer
gtaaaacgacggccagtgcccaaggtgtctctgtcc

SEQ ID NO: 116455 - DNA, 39 bp, Artificial Sequence
  primer
gtaaaacgacggccagttcatacaagtgagccctgacac

SEQ ID NO: 116456 - DNA, 21 bp, Artificial Sequence
  primer
atccaggaatggactcaaacg

SEQ ID NO: 116457 - DNA, 21 bp, Artificial Sequence
  primer
ggcaacagaactggactcatc

SEQ ID NO: 116458 - DNA, 19 bp, Artificial Sequence
  primer
ccaaacatgtgctgggaac

SEQ ID NO: 116459 - DNA, 21 bp, Artificial Sequence
  primer
aaagtcatcatcggtgaccag

SEQ ID NO: 116460 - DNA, 21 bp, Artificial Sequence
  primer
gctagtaagctgtggacctgg

SEQ ID NO: 116461 - DNA, 38 bp, Artificial Sequence
  primer
gtaaaacgacggccagttacgtatcctcctcctgtggg

SEQ ID NO: 116462 - DNA, 25 bp, Artificial Sequence
  primer
aataggtttgccaaagacatagaac

SEQ ID NO: 116463 - DNA, 35 bp, Artificial Sequence
  primer
gtaaaacgacggccagtagcaatcctcctgcctcg

SEQ ID NO: 116464 - DNA, 21 bp, Artificial Sequence
  primer
gcctggaatagacggactttg

SEQ ID NO: 116465 - DNA, 21 bp, Artificial Sequence
  primer
aacacagagtcacggaactgg

SEQ ID NO: 116466 - DNA, 21 bp, Artificial Sequence
  primer
tctatcacccgctagctttcc

SEQ ID NO: 116467 - DNA, 21 bp, Artificial Sequence
  primer
ggaatggaaagtgagtctggg

SEQ ID NO: 116468 - DNA, 38 bp, Artificial Sequence
  primer
gtaaaacgacggccagtttctttcctttaggtgctcgg

SEQ ID NO: 116469 - DNA, 22 bp, Artificial Sequence
  primer
agcacacatcatcagtggaaag

SEQ ID NO: 116470 - DNA, 21 bp, Artificial Sequence
  primer
ggcagcagtagtggttgcttc

SEQ ID NO: 116471 - DNA, 21 bp, Artificial Sequence
  primer
tgatgcatgagaaagtgggag

SEQ ID NO: 116472 - DNA, 38 bp, Artificial Sequence
  primer
gtaaaacgacggccagtgaactcacaggacggcgatag

SEQ ID NO: 116473 - DNA, 19 bp, Artificial Sequence
  primer
ccacatcagggtccagtcc

SEQ ID NO: 116474 - DNA, 21 bp, Artificial Sequence
  primer
taatgaagaagacagcgtgcc

SEQ ID NO: 116475 - DNA, 21 bp, Artificial Sequence
  primer
agggcttattggattcttggc

SEQ ID NO: 116476 - DNA, 21 bp, Artificial Sequence
  primer
atccctggtgcctttctacac

SEQ ID NO: 116477 - DNA, 19 bp, Artificial Sequence
  primer
ggctgaggcatgaagaacc

SEQ ID NO: 116478 - DNA, 19 bp, Artificial Sequence
  primer
ctccatggcccaaacaaag

SEQ ID NO: 116479 - DNA, 22 bp, Artificial Sequence
  primer
ggtgtctaatcatgttgggagg

SEQ ID NO: 116480 - DNA, 21 bp, Artificial Sequence
  primer
cagtaatacaagcagcctggg

SEQ ID NO: 116481 - DNA, 22 bp, Artificial Sequence
  primer
ccctctccaagtaagccctaag

SEQ ID NO: 116482 - DNA, 22 bp, Artificial Sequence
  primer
ttggtccacctgaagagagaag

SEQ ID NO: 116483 - DNA, 24 bp, Artificial Sequence
  primer
tgtttctttctcacaggacagaag

SEQ ID NO: 116484 - DNA, 39 bp, Artificial Sequence
  primer
gtaaaacgacggccagttgagagcacatgcatattggac

SEQ ID NO: 116485 - DNA, 27 bp, Artificial Sequence
  primer
catccaaatcactatatccatgttagc

SEQ ID NO: 116486 - DNA, 21 bp, Artificial Sequence
  primer
tactcacccatcccagttgtg

SEQ ID NO: 116487 - DNA, 21 bp, Artificial Sequence
  primer
tgcatacatcaaagtcctccc

SEQ ID NO: 116488 - DNA, 38 bp, Artificial Sequence
  primer
gtaaaacgacggccagtactccctggagaggaaggatg

SEQ ID NO: 116489 - DNA, 25 bp, Artificial Sequence
  primer
tcacctaatacctttctactttgcc

SEQ ID NO: 116490 - DNA, 21 bp, Artificial Sequence
  primer
ttccaggtacacagttggtgc

SEQ ID NO: 116491 - DNA, 21 bp, Artificial Sequence
  primer
gtgaaagaggtttgtgggtcc

SEQ ID NO: 116492 - DNA, 21 bp, Artificial Sequence
  primer
aaagcctggtccactcatctc

SEQ ID NO: 116493 - DNA, 37 bp, Artificial Sequence
  primer
gtaaaacgacggccagttgctgaagctgctggtctaa

SEQ ID NO: 116494 - DNA, 20 bp, Artificial Sequence
  primer
cttccaccctttcgaggttc

SEQ ID NO: 116495 - DNA, 21 bp, Artificial Sequence
  primer
cctgagtacccatcctccatc

SEQ ID NO: 116496 - DNA, 36 bp, Artificial Sequence
  primer
gtaaaacgacggccagtcagccctgccgactaagag

SEQ ID NO: 116497 - DNA, 19 bp, Artificial Sequence
  primer
gttgccgttgagccaagat

SEQ ID NO: 116498 - DNA, 41 bp, Artificial Sequence
  primer
gtaaaacgacggccagtcatttctgtccaagtttcagagtc

SEQ ID NO: 116499 - DNA, 40 bp, Artificial Sequence
  primer
gtaaaacgacggccagtgagtcttacaatcaaaggccctg

SEQ ID NO: 116500 - DNA, 22 bp, Artificial Sequence
  primer
ttcccgtttcatgtaacactcc

SEQ ID NO: 116501 - DNA, 38 bp, Artificial Sequence
  primer
gtaaaacgacggccagtaagacagtgagggaaagtggg

SEQ ID NO: 116502 - DNA, 40 bp, Artificial Sequence
  primer
gtaaaacgacggccagttggaagtgtttgcttaaatctgc

SEQ ID NO: 116503 - DNA, 38 bp, Artificial Sequence
  primer
gtaaaacgacggccagttccttcttatacccacctggc

SEQ ID NO: 116504 - DNA, 38 bp, Artificial Sequence
  primer
gtaaaacgacggccagttccattctggacaaaccagtg

SEQ ID NO: 116505 - DNA, 25 bp, Artificial Sequence
  primer
tgttctttgtgaacttgagaatgtc

SEQ ID NO: 116506 - DNA, 21 bp, Artificial Sequence
  primer
ctgcacctctttgataccagg

SEQ ID NO: 116507 - DNA, 21 bp, Artificial Sequence
  primer
gccacttatttctcagcttgc

SEQ ID NO: 116508 - DNA, 27 bp, Artificial Sequence
  primer
ttactattaagctggtaattcctttgc

SEQ ID NO: 116509 - DNA, 21 bp, Artificial Sequence
  primer
gccagttccaggtagcacttc

SEQ ID NO: 116510 - DNA, 21 bp, Artificial Sequence
  primer
gcaacctaagtgactgctccc

SEQ ID NO: 116511 - DNA, 21 bp, Artificial Sequence
  primer
tcctccacttcaaacgtgatg

SEQ ID NO: 116512 - DNA, 22 bp, Artificial Sequence
  primer
gcaaatcgcaatatttctagcc

SEQ ID NO: 116513 - DNA, 21 bp, Artificial Sequence
  primer
acccacagtatgagcacttgg

SEQ ID NO: 116514 - DNA, 43 bp, Artificial Sequence
  primer
gtaaaacgacggccagtaatttcagtgtaatatgcagcttctc

SEQ ID NO: 116515 - DNA, 21 bp, Artificial Sequence
  primer
gaggtggaaggacagcttgag

SEQ ID NO: 116516 - DNA, 25 bp, Artificial Sequence
  primer
ggtaactgctaacagcactgtcttc

SEQ ID NO: 116517 - DNA, 38 bp, Artificial Sequence
  primer
gtaaaacgacggccagtgaagatcctccaatgaaaggg

SEQ ID NO: 116518 - DNA, 38 bp, Artificial Sequence
  primer
gtaaaacgacggccagttagtgccgttcctaggtccac

SEQ ID NO: 116519 - DNA, 23 bp, Artificial Sequence
  primer
tccttacacatgggatcaaagac

SEQ ID NO: 116520 - DNA, 22 bp, Artificial Sequence
  primer
tcctcaaataaccaggcttgtg

SEQ ID NO: 116521 - DNA, 38 bp, Artificial Sequence
  primer
gtaaaacgacggccagtggctgtattgatcaggctgtg

SEQ ID NO: 116522 - DNA, 39 bp, Artificial Sequence
  primer
gtaaaacgacggccagtcagtcctgtaactggcacagag

SEQ ID NO: 116523 - DNA, 37 bp, Artificial Sequence
  primer
gtaaaacgacggccagtatcaacattgccagagcacc

SEQ ID NO: 116524 - DNA, 21 bp, Artificial Sequence
  primer
agggctcctcctacttcaatg

SEQ ID NO: 116525 - DNA, 22 bp, Artificial Sequence
  primer
gccatactggcatgatctgtag

SEQ ID NO: 116526 - DNA, 38 bp, Artificial Sequence
  primer
gtaaaacgacggccagtccgaactaagttggtgctgac

SEQ ID NO: 116527 - DNA, 38 bp, Artificial Sequence
  primer
gtaaaacgacggccagttgggagagaataaactgctgc

SEQ ID NO: 116528 - DNA, 21 bp, Artificial Sequence
  primer
gacctttatttcagggcatgg

SEQ ID NO: 116529 - DNA, 21 bp, Artificial Sequence
  primer
atcacctactccaggtcagcc

SEQ ID NO: 116530 - DNA, 21 bp, Artificial Sequence
  primer
agttaagatggcaggtcccag

SEQ ID NO: 116531 - DNA, 21 bp, Artificial Sequence
  primer
actgatcactgggtcacaagc

SEQ ID NO: 116532 - DNA, 21 bp, Artificial Sequence
  primer
tgaccaatcccacacaatcag

SEQ ID NO: 116533 - DNA, 21 bp, Artificial Sequence
  primer
gtgtcactcccaaatgctgag

SEQ ID NO: 116534 - DNA, 21 bp, Artificial Sequence
  primer
cattcaagccattcactgtgg

SEQ ID NO: 116535 - DNA, 38 bp, Artificial Sequence
  primer
gtaaaacgacggccagtacaggtcagtgctcggtaatg

SEQ ID NO: 116536 - DNA, 38 bp, Artificial Sequence
  primer
gtaaaacgacggccagtaataaaccaagccagcaaacg

SEQ ID NO: 116537 - DNA, 38 bp, Artificial Sequence
  primer
gtaaaacgacggccagtgaaaggacacatggcttcctc

SEQ ID NO: 116538 - DNA, 24 bp, Artificial Sequence
  primer
gctcagctaactatgaagtcaccc

SEQ ID NO: 116539 - DNA, 38 bp, Artificial Sequence
  primer
gtaaaacgacggccagtcttccaatcttcctgaatggc

SEQ ID NO: 116540 - DNA, 21 bp, Artificial Sequence
  primer
agccacagagtaggagggaag

SEQ ID NO: 116541 - DNA, 38 bp, Artificial Sequence
  primer
gtaaaacgacggccagttgatgcactagcaatgcaaac

SEQ ID NO: 116542 - DNA, 20 bp, Artificial Sequence
  primer
cgtaacgtggagggtcagag

SEQ ID NO: 116543 - DNA, 22 bp, Artificial Sequence
  primer
aaggaggaagaacttaccgctg

SEQ ID NO: 116544 - DNA, 21 bp, Artificial Sequence
  primer
ggcttagaattgcatgggaag

SEQ ID NO: 116545 - DNA, 20 bp, Artificial Sequence
  primer
aatacacctgccactcacgg

SEQ ID NO: 116546 - DNA, 21 bp, Artificial Sequence
  primer
gaagcttctgaatccctctgg

SEQ ID NO: 116547 - DNA, 22 bp, Artificial Sequence
  primer
tggaaacgactctcaagtcacc

SEQ ID NO: 116548 - DNA, 21 bp, Artificial Sequence
  primer
gtacaggcgggagaaacaaag

SEQ ID NO: 116549 - DNA, 21 bp, Artificial Sequence
  primer
ggaaacatggccacctcttag

SEQ ID NO: 116550 - DNA, 37 bp, Artificial Sequence
  primer
gtaaaacgacggccagtaagagggtgctttcctctgc

SEQ ID NO: 116551 - DNA, 20 bp, Artificial Sequence
  primer
attggctttggaaagcatcc

SEQ ID NO: 116552 - DNA, 37 bp, Artificial Sequence
  primer
gtaaaacgacggccagtctctccctgtttctgggctc

SEQ ID NO: 116553 - DNA, 38 bp, Artificial Sequence
  primer
gtaaaacgacggccagtgcatcgagaaacccgtaattt

SEQ ID NO: 116554 - DNA, 38 bp, Artificial Sequence
  primer
gtaaaacgacggccagtcagatctcagggccttcctac

SEQ ID NO: 116555 - DNA, 21 bp, Artificial Sequence
  primer
agcttcccactttctgtcctg

SEQ ID NO: 116556 - DNA, 37 bp, Artificial Sequence
  primer
gtaaaacgacggccagtgaggcagatcataaaggccc

SEQ ID NO: 116557 - DNA, 38 bp, Artificial Sequence
  primer
gtaaaacgacggccagtcagtaccaggttcagggaagg

SEQ ID NO: 116558 - DNA, 38 bp, Artificial Sequence
  primer
gtaaaacgacggccagtacttcctgggattgtccttcc

SEQ ID NO: 116559 - DNA, 38 bp, Artificial Sequence
  primer
gtaaaacgacggccagttaacttggtgggtgcacagtc

SEQ ID NO: 116560 - DNA, 21 bp, Artificial Sequence
  primer
cacttgcccacaggaagtatc

SEQ ID NO: 116561 - DNA, 38 bp, Artificial Sequence
  primer
gtaaaacgacggccagtggataaccacaaggcaggaag

SEQ ID NO: 116562 - DNA, 37 bp, Artificial Sequence
  primer
gtaaaacgacggccagtactccatctccctctcctgg

SEQ ID NO: 116563 - DNA, 38 bp, Artificial Sequence
  primer
gtaaaacgacggccagttcaatgctgtcgtacagaggg

SEQ ID NO: 116564 - DNA, 38 bp, Artificial Sequence
  primer
gtaaaacgacggccagttctgctgcctctgtcactttg

SEQ ID NO: 116565 - DNA, 38 bp, Artificial Sequence
  primer
gtaaaacgacggccagtgaggttcttctgatgcagtgg

SEQ ID NO: 116566 - DNA, 37 bp, Artificial Sequence; identical to SEQ ID NO: 116562
  primer

SEQ ID NO: 116567 - DNA, 38 bp, Artificial Sequence
  primer
gtaaaacgacggccagtcagcatgtatttcctccctgg

SEQ ID NO: 116568 - DNA, 37 bp, Artificial Sequence
  primer
gtaaaacgacggccagtcctgactcccttcccaagtc

SEQ ID NO: 116569 - DNA, 19 bp, Artificial Sequence
  primer
atgggatgtgagcgtggag

SEQ ID NO: 116570 - DNA, 21 bp, Artificial Sequence
  primer
aagtggtagggccagctgtag

SEQ ID NO: 116571 - DNA, 36 bp, Artificial Sequence
  primer
gtaaaacgacggccagtctcaaaggagaacacgccc

SEQ ID NO: 116572 - DNA, 21 bp, Artificial Sequence
  primer
ttgcacactgaagcgtagagc

SEQ ID NO: 116573 - DNA, 37 bp, Artificial Sequence
  primer
gtaaaacgacggccagtcctccagggtactgtcgttg

SEQ ID NO: 116574 - DNA, 19 bp, Artificial Sequence
  primer
actcagcagggtcaccagc

SEQ ID NO: 116575 - DNA, 35 bp, Artificial Sequence
  primer
gtaaaacgacggccagtgtgttggccgcaatgaac

SEQ ID NO: 116576 - DNA, 20 bp, Artificial Sequence
  primer
accattgctgccactaccac

SEQ ID NO: 116577 - DNA, 21 bp, Artificial Sequence
  primer
aggccagtgcatctctctctc

SEQ ID NO: 116578 - DNA, 37 bp, Artificial Sequence
  primer
gtaaaacgacggccagtcatctccacccagggttagc

SEQ ID NO: 116579 - DNA, 21 bp, Artificial Sequence
  primer
acattgaagcgatctggagtg

SEQ ID NO: 116580 - DNA, 38 bp, Artificial Sequence
  primer
gtaaaacgacggccagttgggattgctaggccaataag

SEQ ID NO: 116581 - DNA, 21 bp, Artificial Sequence
  primer
tacctgcctccactgtgtacc

SEQ ID NO: 116582 - DNA, 20 bp, Artificial Sequence
  primer
gaggaggtctgtttccgagc

SEQ ID NO: 116583 - DNA, 20 bp, Artificial Sequence
  primer
agcttgctccctttctccag

SEQ ID NO: 116584 - DNA, 21 bp, Artificial Sequence
  primer
acctagacgctggccttacag

SEQ ID NO: 116585 - DNA, 21 bp, Artificial Sequence
  primer
cagcaaatagcaggaaaccag

SEQ ID NO: 116586 - DNA, 21 bp, Artificial Sequence
  primer
tctccaaggctgatgtcattg

SEQ ID NO: 116587 - DNA, 21 bp, Artificial Sequence
  primer
ttccaccaaactggcacatag

SEQ ID NO: 116588 - DNA, 20 bp, Artificial Sequence
  primer
ctcatatgatgcgagcatgg

SEQ ID NO: 116589 - DNA, 39 bp, Artificial Sequence
  primer
gtaaaacgacggccagtggaatgccatttaatccaagtg

SEQ ID NO: 116590 - DNA, 21 bp, Artificial Sequence
  primer
ctttggaggaagggcactaac

SEQ ID NO: 116591 - DNA, 21 bp, Artificial Sequence
  primer
gtcattctgtgacctcctggg

SEQ ID NO: 116592 - DNA, 21 bp, Artificial Sequence
  primer
ttccaccaaactggcacatag

SEQ ID NO: 116593 - DNA, 18 bp, Artificial Sequence
  primer
ctctctgccctgtacccg

SEQ ID NO: 116594 - DNA, 40 bp, Artificial Sequence
  primer
gtaaaacgacggccagttttgccactgaagatttcattta

SEQ ID NO: 116595 - DNA, 38 bp, Artificial Sequence
  primer
gtaaaacgacggccagtagtgtaccttaatccgcctgg

SEQ ID NO: 116596 - DNA, 21 bp, Artificial Sequence
  primer
atgcagggattacaggtttgc

SEQ ID NO: 116597 - DNA, 37 bp, Artificial Sequence
  primer
gtaaaacgacggccagtggcaatgatggacagcactc

SEQ ID NO: 116598 - DNA, 21 bp, Artificial Sequence
  primer
gagggtagggtaagccctcag

SEQ ID NO: 116599 - DNA, 23 bp, Artificial Sequence
  primer
aagcaagcaatgcaaatacaaag

SEQ ID NO: 116600 - DNA, 21 bp, Artificial Sequence
  primer
tactgcaattggtcttccagg

SEQ ID NO: 116601 - DNA, 38 bp, Artificial Sequence
  primer
gtaaaacgacggccagtccctccgtggttcactatttg

SEQ ID NO: 116602 - DNA, 38 bp, Artificial Sequence
  primer
gtaaaacgacggccagtaaagaccatggcctctgactg

SEQ ID NO: 116603 - DNA, 21 bp, Artificial Sequence
  primer
accacataaactgggaatggc

SEQ ID NO: 116604 - DNA, 38 bp, Artificial Sequence
  primer
gtaaaacgacggccagtatccaaagggctagcagtgag

SEQ ID NO: 116605 - DNA, 20 bp, Artificial Sequence
  primer
cagaatcttgggctcagtgc

SEQ ID NO: 116606 - DNA, 38 bp, Artificial Sequence
  primer
gtaaaacgacggccagtgtcaagactcctaggtccgcc

SEQ ID NO: 116607 - DNA, 38 bp, Artificial Sequence
  primer
gtaaaacgacggccagtaagagaagtgcttaggcaggc

SEQ ID NO: 116608 - DNA, 21 bp, Artificial Sequence
  primer
cttcgtccctgtctgtcatcc

SEQ ID NO: 116609 - DNA, 21 bp, Artificial Sequence
  primer
ggctgaaggtctgacacaagc

SEQ ID NO: 116610 - DNA, 21 bp, Artificial Sequence
  primer
tctgcacaaggagagaagcag

SEQ ID NO: 116611 - DNA, 37 bp, Artificial Sequence
  primer
gtaaaacgacggccagtattctgccttcaccctcctc

SEQ ID NO: 116612 - DNA, 21 bp, Artificial Sequence
  primer
ttcatgcacacagagggattc

SEQ ID NO: 116613 - DNA, 21 bp, Artificial Sequence
  primer
agaagagatgaacgagcctgg

SEQ ID NO: 116614 - DNA, 21 bp, Artificial Sequence
  primer
tgttgtgtgcttgagttgctg

SEQ ID NO: 116615 - DNA, 19 bp, Artificial Sequence
  primer
caagacactcaccgggacc

SEQ ID NO: 116616 - DNA, 18 bp, Artificial Sequence
  primer
gtaccctaaggccacggg

SEQ ID NO: 116617 - DNA, 21 bp, Artificial Sequence
  primer
tccctggttgagatgatcaag

SEQ ID NO: 116618 - DNA, 39 bp, Artificial Sequence
  primer
gtaaaacgacggccagtaaacttaatggaaggcagcatc

SEQ ID NO: 116619 - DNA, 22 bp, Artificial Sequence
  primer
cccttctgccattaacgtatcc

SEQ ID NO: 116620 - DNA, 23 bp, Artificial Sequence
  primer
ctgctggattaaataattgtggg

SEQ ID NO: 116621 - DNA, 38 bp, Artificial Sequence
  primer
gtaaaacgacggccagtcaagctgttcctgtgcaaatc

SEQ ID NO: 116622 - DNA, 23 bp, Artificial Sequence
  primer
aacacacctattctcccacaatc

SEQ ID NO: 116623 - DNA, 20 bp, Artificial Sequence
  primer
atagcagcgcaagactccat

SEQ ID NO: 116624 - DNA, 39 bp, Artificial Sequence
  primer
gtaaaacgacggccagtaaatgactcaatttccctccag

SEQ ID NO: 116625 - DNA, 36 bp, Artificial Sequence
  primer
gtaaaacgacggccagtttcccatttgcaaggaagc

SEQ ID NO: 116626 - DNA, 36 bp, Artificial Sequence
  primer
gtaaaacgacggccagtagtccagggtctccgttcc

SEQ ID NO: 116627 - DNA, 38 bp, Artificial Sequence
  primer
gtaaaacgacggccagtctctacccgtccctgagtcac

SEQ ID NO: 116628 - DNA, 21 bp, Artificial Sequence
  primer
ataggatgcgtcctcctgtcc

SEQ ID NO: 116629 - DNA, 19 bp, Artificial Sequence
  primer
ccacaccactcacccacag

SEQ ID NO: 116630 - DNA, 21 bp, Artificial Sequence
  primer
cgtcgcaagtccctgataaac

SEQ ID NO: 116631 - DNA, 37 bp, Artificial Sequence
  primer
gtaaaacgacggccagtaaagaacgccacccagactc

SEQ ID NO: 116632 - DNA, 20 bp, Artificial Sequence
  primer
agccctacgagaaccagagg

SEQ ID NO: 116633 - DNA, 21 bp, Artificial Sequence
  primer
cacagtgtcccaaagtcaagg

SEQ ID NO: 116634 - DNA, 21 bp, Artificial Sequence
  primer
cataaaggaagaccacctggc

SEQ ID NO: 116635 - DNA, 38 bp, Artificial Sequence
  primer
gtaaaacgacggccagtgtccacagggtcaaggaagag

SEQ ID NO: 116636 - DNA, 21 bp, Artificial Sequence
  primer
aggagagagcagtgtgacgtg

SEQ ID NO: 116637 - DNA, 21 bp, Artificial Sequence
  primer
aaagggtagggagaggaccag

SEQ ID NO: 116638 - DNA, 21 bp, Artificial Sequence
  primer
aggacacaagggaagaacagg

SEQ ID NO: 116639 - DNA, 19 bp, Artificial Sequence
  primer
cagggacaccctgaacaca

SEQ ID NO: 116640 - DNA, 21 bp, Artificial Sequence
  primer
ccaaccctgggtaaacttcag

SEQ ID NO: 116641 - DNA, 38 bp, Artificial Sequence
  primer
gtaaaacgacggccagtgggtaggtttgtttctcgcag

SEQ ID NO: 116642 - DNA, 21 bp, Artificial Sequence
  primer
cacagctggacagaggcatag

SEQ ID NO: 116643 - DNA, 21 bp, Artificial Sequence
  primer
caattcgtctgggaacaaacc

SEQ ID NO: 116644 - DNA, 21 bp, Artificial Sequence
  primer
ctaggctcaacgacgtcacag

SEQ ID NO: 116645 - DNA, 20 bp, Artificial Sequence
  primer
actcacctcgaatgcagctc

SEQ ID NO: 116646 - DNA, 21 bp, Artificial Sequence
  primer
cctcaacaaacacactcctgc

SEQ ID NO: 116647 - DNA, 21 bp, Artificial Sequence
  primer
acatcctactccaggtcagcc

SEQ ID NO: 116648 - DNA, 38 bp, Artificial Sequence
  primer
gtaaaacgacggccagtagacttcgcaaagtgagccag

SEQ ID NO: 116649 - DNA, 38 bp, Artificial Sequence
  primer
gtaaaacgacggccagtaagggtgtcagtaatgaggcg

SEQ ID NO: 116650 - DNA, 35 bp, Artificial Sequence
  primer
gtaaaacgacggccagtgtggctcggcacacagtc

SEQ ID NO: 116651 - DNA, 38 bp, Artificial Sequence
  primer
gtaaaacgacggccagtcccatccttaccatggagttg

SEQ ID NO: 116652 - DNA, 37 bp, Artificial Sequence
  primer
gtaaaacgacggccagtctgatcttgtgatccacccg

SEQ ID NO: 116653 - DNA, 38 bp, Artificial Sequence
  primer
gtaaaacgacggccagtccacacacacacagtgagcag

SEQ ID NO: 116654 - DNA, 37 bp, Artificial Sequence
  primer
gtaaaacgacggccagtcccagaggcagttctggaag

SEQ ID NO: 116655 - DNA, 21 bp, Artificial Sequence
  primer
gagaagcaccatcactgaagc

SEQ ID NO: 116656 - DNA, 38 bp, Artificial Sequence
  primer
gtaaaacgacggccagtcgcagagatgaagaggttgtg

SEQ ID NO: 116657 - DNA, 36 bp, Artificial Sequence
  primer
gtaaaacgacggccagtagagctgaacagcgactgc

SEQ ID NO: 116658 - DNA, 38 bp, Artificial Sequence
  primer
gtaaaacgacggccagtgaagggaacctgcaaaggaag

SEQ ID NO: 116659 - DNA, 35 bp, Artificial Sequence
  primer
gtaaaacgacggccagtcgccgattcacagtggag

SEQ ID NO: 116660 - DNA, 21 bp, Artificial Sequence
  primer
tgccttgcaagcactaagaag

SEQ ID NO: 116661 - DNA, 38 bp, Artificial Sequence
  primer
gtaaaacgacggccagttgcaatgaagccactctgttc

SEQ ID NO: 116662 - DNA, 38 bp, Artificial Sequence
  primer
gtaaaacgacggccagtcagagctgtagtgatttgccc

SEQ ID NO: 116663 - DNA, 38 bp, Artificial Sequence
  primer
gtaaaacgacggccagtaggctgcaaatcttgttgttg

SEQ ID NO: 116664 - DNA, 41 bp, Artificial Sequence
  primer
gtaaaacgacggccagttgcaatgattgtctccttaacaac

SEQ ID NO: 116665 - DNA, 40 bp, Artificial Sequence
  primer
gtaaaacgacggccagtccattatggactaaccaatcacg

SEQ ID NO: 116666 - DNA, 21 bp, Artificial Sequence
  primer
gctgcctgggttagttctgag

SEQ ID NO: 116667 - DNA, 21 bp, Artificial Sequence
  primer
acctatcagggccacaaactg

SEQ ID NO: 116668 - DNA, 21 bp, Artificial Sequence
  primer
acttggaggagaatgtggagc

SEQ ID NO: 116669 - DNA, 21 bp, Artificial Sequence
  primer
tccagctataaatgacagggc

SEQ ID NO: 116670 - DNA, 21 bp, Artificial Sequence
  primer
accaccacaaggtgggttatg

SEQ ID NO: 116671 - DNA, 38 bp, Artificial Sequence
  primer
gtaaaacgacggccagttggaaatagcccttctttggg

SEQ ID NO: 116672 - DNA, 38 bp, Artificial Sequence
  primer
gtaaaacgacggccagtggaccagaggtgaagagaacc

SEQ ID NO: 116673 - DNA, 38 bp, Artificial Sequence
  primer
gtaaaacgacggccagtgcaaggagaaatggactggag

SEQ ID NO: 116674 - DNA, 21 bp, Artificial Sequence
  primer
aggatgccaatgatcacagag

SEQ ID NO: 116675 - DNA, 21 bp, Artificial Sequence
  primer
acttggaggagaatgtggagc

SEQ ID NO: 116676 - DNA, 20 bp, Artificial Sequence
  primer
cggagcgagatggtgtagag

SEQ ID NO: 116677 - DNA, 21 bp, Artificial Sequence
  primer
gcctctacatttgatctgggc

SEQ ID NO: 116678 - DNA, 37 bp, Artificial Sequence
  primer
gtaaaacgacggccagtgaacaagacatggtccctgc

SEQ ID NO: 116679 - DNA, 21 bp, Artificial Sequence
  primer
atcctaacgccagatcaaacc

SEQ ID NO: 116680 - DNA, 38 bp, Artificial Sequence
  primer
gtaaaacgacggccagtgatgcctattctcccacaagc

SEQ ID NO: 116681 - DNA, 38 bp, Artificial Sequence
  primer
gtaaaacgacggccagtatgcccagttcttagagaccc

SEQ ID NO: 116682 - DNA, 21 bp, Artificial Sequence
  primer
gcacatctgtcccttaccaag

SEQ ID NO: 116683 - DNA, 39 bp, Artificial Sequence
  primer
gtaaaacgacggccagtttactgttcctcccacttctgc

SEQ ID NO: 116684 - DNA, 21 bp, Artificial Sequence
  primer
tctctgcccttcctgtagtcc

SEQ ID NO: 116685 - DNA, 38 bp, Artificial Sequence
  primer
gtaaaacgacggccagtcaagcacacacgagtctcacc

SEQ ID NO: 116686 - DNA, 21 bp, Artificial Sequence
  primer
acagggatggtcccactgtag

SEQ ID NO: 116687 - DNA, 38 bp, Artificial Sequence
  primer
gtaaaacgacggccagttatctggagggtgaggtgtcc

SEQ ID NO: 116688 - DNA, 20 bp, Artificial Sequence
  primer
aagaggtgagcggtggtctc

SEQ ID NO: 116689 - DNA, 21 bp, Artificial Sequence
  primer
tgaggagatgcattgttctgg

SEQ ID NO: 116690 - DNA, 21 bp, Artificial Sequence
  primer
aaggaagacagggtgaagctg

SEQ ID NO: 116691 - DNA, 21 bp, Artificial Sequence
  primer
tgtgatccagatggtctgtcc

SEQ ID NO: 116692 - DNA, 21 bp, Artificial Sequence
  primer
cactaggacacaggtccctcc

SEQ ID NO: 116693 - DNA, 21 bp, Artificial Sequence
  primer
cagaggagtagccgtaatggg

SEQ ID NO: 116694 - DNA, 19 bp, Artificial Sequence
  primer
atgctggtccttgcatgtg

SEQ ID NO: 116695 - DNA, 37 bp, Artificial Sequence
  primer
gtaaaacgacggccagtctgcatactctgggaccctc

SEQ ID NO: 116696 - DNA, 21 bp, Artificial Sequence
  primer
caccaagctggctcactgtag

SEQ ID NO: 116697 - DNA, 37 bp, Artificial Sequence
  primer
gtaaaacgacggccagtgagtgtcgttcagagctggg

SEQ ID NO: 116698 - DNA, 21 bp, Artificial Sequence
  primer
atgggtaaagcttgttctggg

SEQ ID NO: 116699 - DNA, 20 bp, Artificial Sequence
  primer
tcatttctgccaccaccttc

SEQ ID NO: 116700 - DNA, 20 bp, Artificial Sequence
  primer
aagtgatcagcccacctcag

SEQ ID NO: 116701 - DNA, 21 bp, Artificial Sequence
  primer
tcccttatacccatcaggacc

SEQ ID NO: 116702 - DNA, 21 bp, Artificial Sequence
  primer
cagatgagctctgtctggtgg

SEQ ID NO: 116703 - DNA, 21 bp, Artificial Sequence
  primer
gtacctagaggtggcagtcgg

SEQ ID NO: 116704 - DNA, 19 bp, Artificial Sequence
  primer
gagacgatgccaccagtcc

SEQ ID NO: 116705 - DNA, 38 bp, Artificial Sequence
  primer
gtaaaacgacggccagtgcctccttgatagcctccttg

SEQ ID NO: 116706 - DNA, 21 bp, Artificial Sequence
  primer
agaaaccacatgatggcacac

SEQ ID NO: 116707 - DNA, 20 bp, Artificial Sequence
  primer
agcacagagaggctgctgtc

SEQ ID NO: 116708 - DNA, 38 bp, Artificial Sequence
  primer
gtaaaacgacggccagtctttctgggattgtgagggac

SEQ ID NO: 116709 - DNA, 21 bp, Artificial Sequence
  primer
aggagcctgagacacttccag

SEQ ID NO: 116710 - DNA, 38 bp, Artificial Sequence
  primer
gtaaaacgacggccagtggattaaccagcctttggtcc

SEQ ID NO: 116711 - DNA, 20 bp, Artificial Sequence
  primer
gcccaacaggtgcactagac

SEQ ID NO: 116712 - DNA, 21 bp, Artificial Sequence
  primer
tcaggtgggataggagaccag

SEQ ID NO: 116713 - DNA, 21 bp, Artificial Sequence
  primer
cccatatggaaactcagcctc

SEQ ID NO: 116714 - DNA, 37 bp, Artificial Sequence
  primer
gtaaaacgacggccagtcgctagggagaaggaaggac

SEQ ID NO: 116715 - DNA, 20 bp, Artificial Sequence
  primer
agtcacacactctcgcaccc

SEQ ID NO: 116716 - DNA, 37 bp, Artificial Sequence
  primer
gtaaaacgacggccagtccaaacctggagagagaggg

SEQ ID NO: 116717 - DNA, 38 bp, Artificial Sequence
  primer
gtaaaacgacggccagtgtggaatctctgggaaacacc

SEQ ID NO: 116718 - DNA, 38 bp, Artificial Sequence
  primer
gtaaaacgacggccagtgtttcagagcaggaacgtgag

SEQ ID NO: 116719 - DNA, 21 bp, Artificial Sequence
  primer
actgaggtcagactgtggcag

SEQ ID NO: 116720 - DNA, 20 bp, Artificial Sequence
  primer
ccctcagccagagacctgag

SEQ ID NO: 116721 - DNA, 37 bp, Artificial Sequence
  primer
gtaaaacgacggccagtacaggagatgaggtcctcgg

SEQ ID NO: 116722 - DNA, 21 bp, Artificial Sequence
  primer
gcctcgctagctctggttatc

SEQ ID NO: 116723 - DNA, 20 bp, Artificial Sequence
  primer
agggccaggttcgatttatg

SEQ ID NO: 116724 - DNA, 38 bp, Artificial Sequence
  primer
gtaaaacgacggccagtacacagtcttccacaaccagg

SEQ ID NO: 116725 - DNA, 20 bp, Artificial Sequence
  primer
ggcagacattccacttgcac

SEQ ID NO: 116726 - DNA, 38 bp, Artificial Sequence
  primer
gtaaaacgacggccagtctctctccgcctagtcccttc

SEQ ID NO: 116727 - DNA, 38 bp, Artificial Sequence
  primer
gtaaaacgacggccagtcataggtggaaggcagtaggg

SEQ ID NO: 116728 - DNA, 38 bp, Artificial Sequence
  primer
gtaaaacgacggccagttgggatctagtactgggcctg

SEQ ID NO: 116729 - DNA, 40 bp, Artificial Sequence
  primer
gtaaaacgacggccagtcagttctagaaactaggtggccc

SEQ ID NO: 116730 - DNA, 21 bp, Artificial Sequence
  primer
tagctgggcctgaggagttag

SEQ ID NO: 116731 - DNA, 21 bp, Artificial Sequence
  primer
gtcatatagcagggacccagg

SEQ ID NO: 116732 - DNA, 21 bp, Artificial Sequence
  primer
acagtagttgttgggcaaggc

SEQ ID NO: 116733 - DNA, 38 bp, Artificial Sequence
  primer
gtaaaacgacggccagttgcctgtggctacatcttctc

SEQ ID NO: 116734 - DNA, 38 bp, Artificial Sequence
  primer
gtaaaacgacggccagttgactgagatgctagggaggg

SEQ ID NO: 116735 - DNA, 21 bp, Artificial Sequence
  primer
caaggcaaggtgctttactcc

SEQ ID NO: 116736 - DNA, 38 bp, Artificial Sequence
  primer
gtaaaacgacggccagtggatttgtgaaggagaggagg

SEQ ID NO: 116737 - DNA, 21 bp, Artificial Sequence
  primer
gctgaaagaagagagaagccc

SEQ ID NO: 116738 - DNA, 38 bp, Artificial Sequence
  primer
gtaaaacgacggccagtaggtatctcagaggcccatgt

SEQ ID NO: 116739 - DNA, 21 bp, Artificial Sequence
  primer
aaggagcaaaccaaccttgtc

SEQ ID NO: 116740 - DNA, 38 bp, Artificial Sequence
  primer
gtaaaacgacggccagtcttcctggccaccatagaaac

SEQ ID NO: 116741 - DNA, 38 bp, Artificial Sequence
  primer
gtaaaacgacggccagtccagctctgaactcttccagg

SEQ ID NO: 116742 - DNA, 20 bp, Artificial Sequence
  primer
ctctctccagccacctgctc

SEQ ID NO: 116743 - DNA, 21 bp, Artificial Sequence
  primer
ttggtcctgtccctaacttgg

SEQ ID NO: 116744 - DNA, 38 bp, Artificial Sequence
  primer
gtaaaacgacggccagtagagacatgagaggtggaggg

SEQ ID NO: 116745 - DNA, 21 bp, Artificial Sequence
  primer
gggaaggtggaggttcagaag

SEQ ID NO: 116746 - DNA, 38 bp, Artificial Sequence
  primer
gtaaaacgacggccagttctccaagcaggacaagaagg

SEQ ID NO: 116747 - DNA, 21 bp, Artificial Sequence
  primer
ctgcctgtaggaatgacgagg

SEQ ID NO: 116748 - DNA, 21 bp, Artificial Sequence
  primer
tggtttctttcctggatgatg

SEQ ID NO: 116749 - DNA, 20 bp, Artificial Sequence
  primer
aggagacgggtaggcaacag

SEQ ID NO: 116750 - DNA, 37 bp, Artificial Sequence
  primer
gtaaaacgacggccagtgagattccaggtgctgttgg

SEQ ID NO: 116751 - DNA, 21 bp, Artificial Sequence
  primer
caggtatgacccagttagccc

SEQ ID NO: 116752 - DNA, 21 bp, Artificial Sequence
  primer
acagctaggaagtgactccgc

SEQ ID NO: 116753 - DNA, 21 bp, Artificial Sequence
  primer
ctttggttagggtctcgctcc

SEQ ID NO: 116754 - DNA, 35 bp, Artificial Sequence
  primer
gtaaaacgacggccagtgaaccgaacgtcagcacc

SEQ ID NO: 116755 - DNA, 38 bp, Artificial Sequence
  primer
gtaaaacgacggccagtcgtagtaggtggaagggaggg

SEQ ID NO: 116756 - DNA, 38 bp, Artificial Sequence
  primer
gtaaaacgacggccagtagaaacaccaccattgaaggc

SEQ ID NO: 116757 - DNA, 20 bp, Artificial Sequence
  primer
ggccaagcccatatcaagag

SEQ ID NO: 116758 - DNA, 38 bp, Artificial Sequence
  primer
gtaaaacgacggccagtcaacacatagctacgcttgcc

SEQ ID NO: 116759 - DNA, 38 bp, Artificial Sequence
  primer
gtaaaacgacggccagtaggtttccagcttaggcaatg

SEQ ID NO: 116760 - DNA, 38 bp, Artificial Sequence
  primer
gtaaaacgacggccagtatttgatgacttccaggcagg

SEQ ID NO: 116761 - DNA, 21 bp, Artificial Sequence
  primer
agctccgggaactaaggaatg

SEQ ID NO: 116762 - DNA, 21 bp, Artificial Sequence
  primer
atcctatcctgtgaagggctg

SEQ ID NO: 116763 - DNA, 38 bp, Artificial Sequence
  primer
gtaaaacgacggccagtaatgaacaagggatgcgtttc

SEQ ID NO: 116764 - DNA, 44 bp, Artificial Sequence
  primer
gtaaaacgacggccagtcagcagaagcaatgatacaaactttag

SEQ ID NO: 116765 - DNA, 27 bp, Artificial Sequence
  primer
tctagctaaatctaaacattcgattcc

SEQ ID NO: 116766 - DNA, 38 bp, Artificial Sequence
  primer
gtaaaacgacggccagtcatgggaaagagtgtggtctg

SEQ ID NO: 116767 - DNA, 38 bp, Artificial Sequence; identical to SEQ ID NO: 116766
  primer

SEQ ID NO: 116768 - DNA, 22 bp, Artificial Sequence
  primer
tgttagatgccaaccactgttc

SEQ ID NO: 116769 - DNA, 22 bp, Artificial Sequence
  primer
aaatcctcactttctggaatgg

SEQ ID NO: 116770 - DNA, 38 bp, Artificial Sequence
  primer
gtaaaacgacggccagtttacctaccacaacacctggg

SEQ ID NO: 116771 - DNA, 20 bp, Artificial Sequence
  primer
gtgtgaggcaaagaaggctg

SEQ ID NO: 116772 - DNA, 37 bp, Artificial Sequence
  primer
gtaaaacgacggccagtgcatttaaatcccaaatgcg

SEQ ID NO: 116773 - DNA, 37 bp, Artificial Sequence
  primer
gtaaaacgacggccagttttggccctattccaaactg

SEQ ID NO: 116774 - DNA, 21 bp, Artificial Sequence
  primer
aaccctcctaccctgacttcc

SEQ ID NO: 116775 - DNA, 21 bp, Artificial Sequence
  primer
aaccctcctaccctgacttcc

SEQ ID NO: 116776 - DNA, 21 bp, Artificial Sequence
  primer
taacctgatcccacaaatccc

SEQ ID NO: 116777 - DNA, 25 bp, Artificial Sequence
  primer
ttaggcttcattagcaacttctagg

SEQ ID NO: 116778 - DNA, 41 bp, Artificial Sequence
  primer
gtaaaacgacggccagtaagaaagggctaggattgagaaag

SEQ ID NO: 116779 - DNA, 37 bp, Artificial Sequence
  primer
gtaaaacgacggccagtttgctcattaggccagcaac

SEQ ID NO: 116780 - DNA, 38 bp, Artificial Sequence
  primer
gtaaaacgacggccagttgtcgtccgtacaatagtggg

SEQ ID NO: 116781 - DNA, 21 bp, Artificial Sequence
  primer
ggtaccactggcatcttcctc

SEQ ID NO: 116782 - DNA, 38 bp, Artificial Sequence
  primer
gtaaaacgacggccagtgtgtggaagcatgttcagagg

SEQ ID NO: 116783 - DNA, 38 bp, Artificial Sequence
  primer
gtaaaacgacggccagtcctagcttctggaagtgggag

SEQ ID NO: 116784 - DNA, 21 bp, Artificial Sequence
  primer
atcttgggccagatccttctc

SEQ ID NO: 116785 - DNA, 21 bp, Artificial Sequence
  primer
tggctctttaatgggaaatgg

SEQ ID NO: 116786 - DNA, 38 bp, Artificial Sequence
  primer
gtaaaacgacggccagtttcacattcacttctcgaccg

SEQ ID NO: 116787 - DNA, 20 bp, Artificial Sequence
  primer
cgtccgcctaaaggtcattc

SEQ ID NO: 116788 - DNA, 21 bp, Artificial Sequence
  primer
tctacacacacatgcagagcc

SEQ ID NO: 116789 - DNA, 38 bp, Artificial Sequence
  primer
gtaaaacgacggccagtcccatgctaatgtgccctaag

SEQ ID NO: 116790 - DNA, 35 bp, Artificial Sequence
  primer
gtaaaacgacggccagtgcgcccagcttacacatc

SEQ ID NO: 116791 - DNA, 21 bp, Artificial Sequence
  primer
gctttacaaatgctggagctg

SEQ ID NO: 116792 - DNA, 38 bp, Artificial Sequence
  primer
gtaaaacgacggccagttgtcccaattatttgctgtgc

SEQ ID NO: 116793 - DNA, 37 bp, Artificial Sequence
  primer
gtaaaacgacggccagtgcgtactgcaagacggagtc

SEQ ID NO: 116794 - DNA, 27 bp, Artificial Sequence
  primer
aaggtcctagtaaccttgaatctcttc

SEQ ID NO: 116795 - DNA, 26 bp, Artificial Sequence
  primer
gaaactgtactgtaagtattgctccg

SEQ ID NO: 116796 - DNA, 21 bp, Artificial Sequence
  primer
tgggagatcgaaagtgatgag

SEQ ID NO: 116797 - DNA, 41 bp, Artificial Sequence
  primer
gtaaaacgacggccagttgttgagctgatcacatctctctc

SEQ ID NO: 116798 - DNA, 21 bp, Artificial Sequence
  primer
aaagaagctaacgtggcttgg

SEQ ID NO: 116799 - DNA, 38 bp, Artificial Sequence
  primer
gtaaaacgacggccagtgtgatcctggcagctactctg

SEQ ID NO: 116800 - DNA, 38 bp, Artificial Sequence
  primer
gtaaaacgacggccagttagaatgccacaagaactggg

SEQ ID NO: 116801 - DNA, 38 bp, Artificial Sequence
  primer
gtaaaacgacggccagtggttattctttccatggctgg

SEQ ID NO: 116802 - DNA, 21 bp, Artificial Sequence
  primer
tttctccagtcctgtcaaggg

SEQ ID NO: 116803 - DNA, 21 bp, Artificial Sequence
  primer
atggcctcgctgatgtaaata

SEQ ID NO: 116804 - DNA, 21 bp, Artificial Sequence
  primer
ctcccacctgtaacatggctc

SEQ ID NO: 116805 - DNA, 38 bp, Artificial Sequence
  primer
gtaaaacgacggccagtatctttgggaagggacaactg

SEQ ID NO: 116806 - DNA, 20 bp, Artificial Sequence
  primer
aactccatgtgggatgcaag

SEQ ID NO: 116807 - DNA, 24 bp, Artificial Sequence
  primer
agcactaagggtgacaggtacttc

SEQ ID NO: 116808 - DNA, 40 bp, Artificial Sequence
  primer
gtaaaacgacggccagtgcctcctgtgaatgtgtaatagg

SEQ ID NO: 116809 - DNA, 40 bp, Artificial Sequence
  primer
gtaaaacgacggccagtaaatcagctgaatcaaggaggag

SEQ ID NO: 116810 - DNA, 21 bp, Artificial Sequence
  primer
taccctatcaaacagcagcgg

SEQ ID NO: 116811 - DNA, 39 bp, Artificial Sequence
  primer
gtaaaacgacggccagtttcttcagaaggtttacagggc

SEQ ID NO: 116812 - DNA, 21 bp, Artificial Sequence
  primer
tgagttcatccacattctcgg

SEQ ID NO: 116813 - DNA, 38 bp, Artificial Sequence
  primer
gtaaaacgacggccagttaagctgcccttgacattctg

SEQ ID NO: 116814 - DNA, 21 bp, Artificial Sequence
  primer
acagacatttgcatcctggtc

SEQ ID NO: 116815 - DNA, 20 bp, Artificial Sequence
  primer
acagtcatgcagggtggaag

SEQ ID NO: 116816 - DNA, 38 bp, Artificial Sequence
  primer
gtaaaacgacggccagtgtgtccttccctccttaccag

SEQ ID NO: 116817 - DNA, 20 bp, Artificial Sequence
  primer
gtggtcaccagttgtgaggg

SEQ ID NO: 116818 - DNA, 21 bp, Artificial Sequence
  primer
gagccattcccaggacttatg

SEQ ID NO: 116819 - DNA, 19 bp, Artificial Sequence
  primer
tgcataggcctgaggtgag

SEQ ID NO: 116820 - DNA, 38 bp, Artificial Sequence
  primer
gtaaaacgacggccagttcgatgaacccgatgtaactg

SEQ ID NO: 116821 - DNA, 38 bp, Artificial Sequence
  primer
gtaaaacgacggccagttgttatggttatggctgagcg

SEQ ID NO: 116822 - DNA, 22 bp, Artificial Sequence
  primer
aagaagaggtgagggtcaaagg

SEQ ID NO: 116823 - DNA, 38 bp, Artificial Sequence
  primer
gtaaaacgacggccagtcctctctactgctctgggctg

SEQ ID NO: 116824 - DNA, 21 bp, Artificial Sequence
  primer
agggtcttctctgcctaaggg

SEQ ID NO: 116825 - DNA, 38 bp, Artificial Sequence
  primer
gtaaaacgacggccagtacttgctatcccaggtctccc

SEQ ID NO: 116826 - DNA, 21 bp, Artificial Sequence
  primer
caaagccaaagatcctgtgag

SEQ ID NO: 116827 - DNA, 21 bp, Artificial Sequence
  primer
ggtacagtggtcccatccttg

SEQ ID NO: 116828 - DNA, 21 bp, Artificial Sequence
  primer
attctccgtgcctggtaacac

SEQ ID NO: 116829 - DNA, 21 bp, Artificial Sequence
  primer
ttcttattgagccctgggatg

SEQ ID NO: 116830 - DNA, 21 bp, Artificial Sequence
  primer
gtaccaaggtccaagctcctg

SEQ ID NO: 116831 - DNA, 38 bp, Artificial Sequence
  primer
gtaaaacgacggccagtacgtcccttcacctgtcagag

SEQ ID NO: 116832 - DNA, 21 bp, Artificial Sequence
  primer
ccttctcagctacacttcggg

SEQ ID NO: 116833 - DNA, 23 bp, Artificial Sequence
  primer
tcctttcagtctttctccctttg

SEQ ID NO: 116834 - DNA, 21 bp, Artificial Sequence
  primer
gatccactttgccatatgctg

SEQ ID NO: 116835 - DNA, 26 bp, Artificial Sequence
  primer
ttaagtatccatacacttgaaatcgg

SEQ ID NO: 116836 - DNA, 21 bp, Artificial Sequence
  primer
catgtgacccactgtgtgttg

SEQ ID NO: 116837 - DNA, 39 bp, Artificial Sequence
  primer
gtaaaacgacggccagtagacaaacattagatcctgggc

SEQ ID NO: 116838 - DNA, 38 bp, Artificial Sequence
  primer
gtaaaacgacggccagttggtcaaggagacatctggtg

SEQ ID NO: 116839 - DNA, 39 bp, Artificial Sequence
  primer
gtaaaacgacggccagtcagcaagctgttgaagagagac

SEQ ID NO: 116840 - DNA, 38 bp, Artificial Sequence
  primer
gtaaaacgacggccagtctgtgatccactttgccattc

SEQ ID NO: 116841 - DNA, 38 bp, Artificial Sequence
  primer
gtaaaacgacggccagttgattcccagccttcactctc

SEQ ID NO: 116842 - DNA, 21 bp, Artificial Sequence
  primer
tgggagttacaacttgccagg

SEQ ID NO: 116843 - DNA, 22 bp, Artificial Sequence
  primer
tccaccttaccaaatgatttcc

SEQ ID NO: 116844 - DNA, 38 bp, Artificial Sequence
  primer
gtaaaacgacggccagtgtggcatggtatcaaatctgc

SEQ ID NO: 116845 - DNA, 21 bp, Artificial Sequence
  primer
tgccaacgcaatctttaggac

SEQ ID NO: 116846 - DNA, 23 bp, Artificial Sequence
  primer
tgcaagtctctcagtgataaggg

SEQ ID NO: 116847 - DNA, 39 bp, Artificial Sequence
  primer
gtaaaacgacggccagtctcattgtcaagacacaaagcc

SEQ ID NO: 116848 - DNA, 21 bp, Artificial Sequence
  primer
gcatgttctccaaatcccttc

SEQ ID NO: 116849 - DNA, 22 bp, Artificial Sequence
  primer
tgtggctgtacagtgaaaggag

SEQ ID NO: 116850 - DNA, 25 bp, Artificial Sequence
  primer
ttacaaattcatcccagaacacttt

SEQ ID NO: 116851 - DNA, 21 bp, Artificial Sequence
  primer
ctttctacctcacctccctgg

SEQ ID NO: 116852 - DNA, 38 bp, Artificial Sequence
  primer
gtaaaacgacggccagtaggaatggctttgttactggc

SEQ ID NO: 116853 - DNA, 43 bp, Artificial Sequence
  primer
gtaaaacgacggccagtgcagaatacagtaagggaagctattg

SEQ ID NO: 116854 - DNA, 38 bp, Artificial Sequence
  primer
gtaaaacgacggccagtgactcagcatcccatttagcc

SEQ ID NO: 116855 - DNA, 21 bp, Artificial Sequence
  primer
ctgtgcatggctgaaggatac

SEQ ID NO: 116856 - DNA, 40 bp, Artificial Sequence
  primer
gtaaaacgacggccagttcatcatcatcttgacagtgcag

SEQ ID NO: 116857 - DNA, 21 bp, Artificial Sequence
  primer
gttcgggactgagaaggacag

SEQ ID NO: 116858 - DNA, 21 bp, Artificial Sequence
  primer
cactctacgtctcctcccagc

SEQ ID NO: 116859 - DNA, 21 bp, Artificial Sequence
  primer
tatatgccaagcatttccacg

SEQ ID NO: 116860 - DNA, 40 bp, Artificial Sequence
  primer
gtaaaacgacggccagtgaggcaaattactagacccaacc

SEQ ID NO: 116861 - DNA, 41 bp, Artificial Sequence
  primer
gtaaaacgacggccagtgaattagcgtggtttcaatttcac

SEQ ID NO: 116862 - DNA, 40 bp, Artificial Sequence
  primer
gtaaaacgacggccagtccctgccaagcagatatttatac

SEQ ID NO: 116863 - DNA, 38 bp, Artificial Sequence
  primer
gtaaaacgacggccagtcttggctgtgagaactggaac

SEQ ID NO: 116864 - DNA, 21 bp, Artificial Sequence
  primer
tcagacaccctggtgtacctc

SEQ ID NO: 116865 - DNA, 20 bp, Artificial Sequence
  primer
cagcctgatgctgttctctg

SEQ ID NO: 116866 - DNA, 38 bp, Artificial Sequence
  primer
gtaaaacgacggccagtcacactgagtgagcagggttg

SEQ ID NO: 116867 - DNA, 21 bp, Artificial Sequence
  primer
ctgatccagaagagaccatgc

SEQ ID NO: 116868 - DNA, 21 bp, Artificial Sequence
  primer
aacactcagtgaactgcggac

SEQ ID NO: 116869 - DNA, 38 bp, Artificial Sequence
  primer
gtaaaacgacggccagtcctggaacttggattctcctg

SEQ ID NO: 116870 - DNA, 21 bp, Artificial Sequence
  primer
ctcgcacgtgaccagatagag

SEQ ID NO: 116871 - DNA, 38 bp, Artificial Sequence
  primer
gtaaaacgacggccagtactgttgggacgggaatctac

SEQ ID NO: 116872 - DNA, 22 bp, Artificial Sequence
  primer
tggcctctgcaagtttcattac

SEQ ID NO: 116873 - DNA, 38 bp, Artificial Sequence
  primer
gtaaaacgacggccagtctcacctgttctggaatacgc

SEQ ID NO: 116874 - DNA, 21 bp, Artificial Sequence
  primer
agcatggcctattctgaactg

SEQ ID NO: 116875 - DNA, 38 bp, Artificial Sequence
  primer
gtaaaacgacggccagtacacaagacactccatgccag

SEQ ID NO: 116876 - DNA, 21 bp, Artificial Sequence
  primer
aacctgacattgggctaaacg

SEQ ID NO: 116877 - DNA, 19 bp, Artificial Sequence
  primer
cattcccgcactgtgactg

SEQ ID NO: 116878 - DNA, 22 bp, Artificial Sequence
  primer
ggattagacgtgggtaatggtg

SEQ ID NO: 116879 - DNA, 37 bp, Artificial Sequence
  primer
gtaaaacgacggccagtctggaggcacctgtggttag

SEQ ID NO: 116880 - DNA, 21 bp, Artificial Sequence
  primer
gaggtttctgagtgggctttg

SEQ ID NO: 116881 - DNA, 20 bp, Artificial Sequence
  primer
tctgctgtgtgctggaaatg

SEQ ID NO: 116882 - DNA, 38 bp, Artificial Sequence
  primer
gtaaaacgacggccagtcagtagaaggccctgaacacc

SEQ ID NO: 116883 - DNA, 21 bp, Artificial Sequence
  primer
ggaaggagcttgtttcccaag

SEQ ID NO: 116884 - DNA, 19 bp, Artificial Sequence
  primer
gaagaagcgctcctggaag

SEQ ID NO: 116885 - DNA, 35 bp, Artificial Sequence
  primer
gtaaaacgacggccagtcggacccagaacctgtct

SEQ ID NO: 116886 - DNA, 37 bp, Artificial Sequence
  primer
gtaaaacgacggccagtacttcccgtagtagcgctgg

SEQ ID NO: 116887 - DNA, 18 bp, Artificial Sequence
  primer
agcggtgggagtcagagg

SEQ ID NO: 116888 - DNA, 39 bp, Artificial Sequence
  primer
gtaaaacgacggccagtgaacaagtccttgatctgtcgg

SEQ ID NO: 116889 - DNA, 38 bp, Artificial Sequence
  primer
gtaaaacgacggccagtgggcagagacttgaagtttgg

SEQ ID NO: 116890 - DNA, 19 bp, Artificial Sequence
  primer
ctcccaggatgagggtcag

SEQ ID NO: 116891 - DNA, 21 bp, Artificial Sequence
  primer
ctacagccagtgctgagaggg

SEQ ID NO: 116892 - DNA, 38 bp, Artificial Sequence
  primer
gtaaaacgacggccagtaaggtcaggttgatctcggtg

SEQ ID NO: 116893 - DNA, 21 bp, Artificial Sequence
  primer
tggagaagatgatgttgctgg

SEQ ID NO: 116894 - DNA, 38 bp, Artificial Sequence
  primer
gtaaaacgacggccagtcctgatctcgccactgtattc

SEQ ID NO: 116895 - DNA, 20 bp, Artificial Sequence
  primer
aagcaggatcttctgggtgg

SEQ ID NO: 116896 - DNA, 37 bp, Artificial Sequence
  primer
gtaaaacgacggccagtcctccaggcgtttattcagc

SEQ ID NO: 116897 - DNA, 42 bp, Artificial Sequence
  primer
gtaaaacgacggccagttcgaattcttcaaattataggcttt

SEQ ID NO: 116898 - DNA, 21 bp, Artificial Sequence
  primer
gttcacagcaaatgtccatcc

SEQ ID NO: 116899 - DNA, 42 bp, Artificial Sequence; identical to SEQ ID NO: 116897
  primer

SEQ ID NO: 116900 - DNA, 21 bp, Artificial Sequence
  primer
gggaaatgcagttaaacaggg

SEQ ID NO: 116901 - DNA, 26 bp, Artificial Sequence
  primer
tttattaattacctttctgctttggg

SEQ ID NO: 116902 - DNA, 27 bp, Artificial Sequence
  primer
catgtggtacatacaagttatcctctg

SEQ ID NO: 116903 - DNA, 21 bp, Artificial Sequence
  primer
gggcatgaatcaatcatcatc

SEQ ID NO: 116904 - DNA, 38 bp, Artificial Sequence
  primer
gtaaaacgacggccagttgttgttggctacacctttgg

SEQ ID NO: 116905 - DNA, 20 bp, Artificial Sequence
  primer
gaaccagcaggatgatttgc

SEQ ID NO: 116906 - DNA, 42 bp, Artificial Sequence
  primer
gtaaaacgacggccagtgcaaacctaatagcacaaatattcc

SEQ ID NO: 116907 - DNA, 25 bp, Artificial Sequence
  primer
ccaattggaaatgctcatactaaag

SEQ ID NO: 116908 - DNA, 25 bp, Artificial Sequence
  primer
aatccattaagaacattgtcctgtg

SEQ ID NO: 116909 - DNA, 19 bp, Artificial Sequence
  primer
ccattgcactccagcccta

SEQ ID NO: 116910 - DNA, 21 bp, Artificial Sequence
  primer
caggccaatttcacatcattc

SEQ ID NO: 116911 - DNA, 22 bp, Artificial Sequence
  primer
tggtgagagatggaaagacttg

SEQ ID NO: 116912 - DNA, 27 bp, Artificial Sequence
  primer
tgaataattggaatataagacggagtc

SEQ ID NO: 116913 - DNA, 21 bp, Artificial Sequence
  primer
agggtttcacaccaaacaatg

SEQ ID NO: 116914 - DNA, 40 bp, Artificial Sequence
  primer
gtaaaacgacggccagtttgccaactctgtaaaccttcag

SEQ ID NO: 116915 - DNA, 20 bp, Artificial Sequence
  primer
agccctgatcatgccactac

SEQ ID NO: 116916 - DNA, 22 bp, Artificial Sequence
  primer
ttctcttaagcagagggtggac

SEQ ID NO: 116917 - DNA, 40 bp, Artificial Sequence
  primer
gtaaaacgacggccagtaggagtagatgttacatggcagg

SEQ ID NO: 116918 - DNA, 21 bp, Artificial Sequence
  primer
tctgggaacagagaggaccag

SEQ ID NO: 116919 - DNA, 37 bp, Artificial Sequence
  primer
gtaaaacgacggccagtgtgaccgaaggcatgtatgg

SEQ ID NO: 116920 - DNA, 21 bp, Artificial Sequence
  primer
gatttccagcggtttcatagg

SEQ ID NO: 116921 - DNA, 37 bp, Artificial Sequence
  primer
gtaaaacgacggccagtgtgtgtgcaggaagaccctg

SEQ ID NO: 116922 - DNA, 21 bp, Artificial Sequence
  primer
acagactgtggaggtggtttg

SEQ ID NO: 116923 - DNA, 38 bp, Artificial Sequence
  primer
gtaaaacgacggccagtatagatgcccagagcacacac

SEQ ID NO: 116924 - DNA, 38 bp, Artificial Sequence
  primer
gtaaaacgacggccagtacaggtccagagacacacagg

SEQ ID NO: 116925 - DNA, 38 bp, Artificial Sequence
  primer
gtaaaacgacggccagttggatcagcatgtcctagtgg

SEQ ID NO: 116926 - DNA, 38 bp, Artificial Sequence
  primer
gtaaaacgacggccagtcttctccacacaagggcaaac

SEQ ID NO: 116927 - DNA, 20 bp, Artificial Sequence
  primer
ccgaccaatgaacaaacagc

SEQ ID NO: 116928 - DNA, 21 bp, Artificial Sequence
  primer
gtaaagcagggtcctcacagg

SEQ ID NO: 116929 - DNA, 21 bp, Artificial Sequence
  primer
agaatgaccctgagtgctgtg

SEQ ID NO: 116930 - DNA, 19 bp, Artificial Sequence
  primer
caggcctctgcctctttcc

SEQ ID NO: 116931 - DNA, 38 bp, Artificial Sequence
  primer
gtaaaacgacggccagtgcctcctctggttgactgttc

SEQ ID NO: 116932 - DNA, 38 bp, Artificial Sequence
  primer
gtaaaacgacggccagttgagcagcaaagcatacatcc

SEQ ID NO: 116933 - DNA, 19 bp, Artificial Sequence
  primer
tgcagggagaaacagccac

SEQ ID NO: 116934 - DNA, 37 bp, Artificial Sequence
  primer
gtaaaacgacggccagtaaggtgcagtgaggagggag

SEQ ID NO: 116935 - DNA, 21 bp, Artificial Sequence
  primer
aagggttcctccctccattag

SEQ ID NO: 116936 - DNA, 36 bp, Artificial Sequence
  primer
gtaaaacgacggccagtgtctcggcaaccaagaagc

SEQ ID NO: 116937 - DNA, 22 bp, Artificial Sequence
  primer
tttgcaaagaagaggaggtttc

SEQ ID NO: 116938 - DNA, 22 bp, Artificial Sequence
  primer
aaagtatggcagtacattgggc

SEQ ID NO: 116939 - DNA, 21 bp, Artificial Sequence
  primer
acttgccgttgttcagggtaa

SEQ ID NO: 116940 - DNA, 38 bp, Artificial Sequence
  primer
gtaaaacgacggccagtcacatagatatggtgcgacgg

SEQ ID NO: 116941 - DNA, 38 bp, Artificial Sequence
  primer
gtaaaacgacggccagttttagcaaatgccttcccttt

SEQ ID NO: 116942 - DNA, 38 bp, Artificial Sequence
  primer
gtaaaacgacggccagtttcgccctctgctttctactg

SEQ ID NO: 116943 - DNA, 21 bp, Artificial Sequence
  primer
gttatctacagacgcgccacc

SEQ ID NO: 116944 - DNA, 21 bp, Artificial Sequence
  primer
ctctgtgttgactccctctgg

SEQ ID NO: 116945 - DNA, 35 bp, Artificial Sequence
  primer
gtaaaacgacggccagtgcctcccgaagtgctcag

SEQ ID NO: 116946 - DNA, 20 bp, Artificial Sequence
  primer
gacgttgacagtagaggcgg

SEQ ID NO: 116947 - DNA, 22 bp, Artificial Sequence
  primer
ttctttgggtcaaatcaaacag

SEQ ID NO: 116948 - DNA, 21 bp, Artificial Sequence
  primer
ggctgcaatcatattcttggg

SEQ ID NO: 116949 - DNA, 38 bp, Artificial Sequence
  primer
gtaaaacgacggccagttgatggaaatttcttccctgg

SEQ ID NO: 116950 - DNA, 39 bp, Artificial Sequence
  primer
gtaaaacgacggccagtgcgcttatatgcatccaatttc

SEQ ID NO: 116951 - DNA, 22 bp, Artificial Sequence
  primer
ggaggaacaaggtgaggctaag

SEQ ID NO: 116952 - DNA, 35 bp, Artificial Sequence
  primer
gtaaaacgacggccagtaatcaccggccctcaaag

SEQ ID NO: 116953 - DNA, 38 bp, Artificial Sequence
  primer
gtaaaacgacggccagttttgagcttgaaatacctggc

SEQ ID NO: 116954 - DNA, 38 bp, Artificial Sequence
  primer
gtaaaacgacggccagtaaagcaacaggcactgctagg

SEQ ID NO: 116955 - DNA, 21 bp, Artificial Sequence
  primer
cctgctcgatgtaagggattc

SEQ ID NO: 116956 - DNA, 18 bp, Artificial Sequence
  primer
ggcagcgagcaagagagg

SEQ ID NO: 116957 - DNA, 21 bp, Artificial Sequence
  primer
aacaagactcagagccaaggg

SEQ ID NO: 116958 - DNA, 21 bp, Artificial Sequence
  primer
gatgacagcctctgtgggaag

SEQ ID NO: 116959 - DNA, 38 bp, Artificial Sequence
  primer
gtaaaacgacggccagtgtaggagagtgtgggtttggg

SEQ ID NO: 116960 - DNA, 37 bp, Artificial Sequence
  primer
gtaaaacgacggccagtcaggaaacaggcacgaagac

SEQ ID NO: 116961 - DNA, 38 bp, Artificial Sequence
  primer
gtaaaacgacggccagttccttgagagtctagcagccc

SEQ ID NO: 116962 - DNA, 21 bp, Artificial Sequence
  primer
tgtgaccctcaagcttacctg

SEQ ID NO: 116963 - DNA, 21 bp, Artificial Sequence
  primer
acctcaggtcaaagttcctgc

SEQ ID NO: 116964 - DNA, 21 bp, Artificial Sequence
  primer
agttggcattgcagttaccag

SEQ ID NO: 116965 - DNA, 23 bp, Artificial Sequence
  primer
acaaacccttgcttgttaaactg

SEQ ID NO: 116966 - DNA, 40 bp, Artificial Sequence
  primer
gtaaaacgacggccagttgctgtttcacatatgaggtttg

SEQ ID NO: 116967 - DNA, 38 bp, Artificial Sequence
  primer
gtaaaacgacggccagttgaaacagtgcagttgaccag

SEQ ID NO: 116968 - DNA, 41 bp, Artificial Sequence
  primer
gtaaaacgacggccagtcaattaataaacctgaaacgtccc

SEQ ID NO: 116969 - DNA, 38 bp, Artificial Sequence
  primer
gtaaaacgacggccagttcaagattgccttacaatggg

SEQ ID NO: 116970 - DNA, 46 bp, Artificial Sequence
  primer
gtaaaacgacggccagtaaatatcaacttattacacaagggtcttt

SEQ ID NO: 116971 - DNA, 37 bp, Artificial Sequence
  primer
gtaaaacgacggccagtgatccacccacctcagcttc

SEQ ID NO: 116972 - DNA, 23 bp, Artificial Sequence
  primer
ccaaagaggaggtaccgtataaa

SEQ ID NO: 116973 - DNA, 41 bp, Artificial Sequence
  primer
gtaaaacgacggccagtaatcaggaaagggcctatttattc

SEQ ID NO: 116974 - DNA, 38 bp, Artificial Sequence
  primer
gtaaaacgacggccagtaaaggaagagtggcctgaaag

SEQ ID NO: 116975 - DNA, 27 bp, Artificial Sequence
  primer
aaacaagtgaggaatgtagattagcaa

SEQ ID NO: 116976 - DNA, 24 bp, Artificial Sequence
  primer
tccttgatacacagttggtgactg

SEQ ID NO: 116977 - DNA, 43 bp, Artificial Sequence
  primer
gtaaaacgacggccagttttaaggaaacatttaagtttggctc

SEQ ID NO: 116978 - DNA, 22 bp, Artificial Sequence
  primer
tgcatcagcagcaaggttatac

SEQ ID NO: 116979 - DNA, 22 bp, Artificial Sequence
  primer
gggtttaattgattgacattgc

SEQ ID NO: 116980 - DNA, 20 bp, Artificial Sequence
  primer
ctccagaggcaacaggtacg

SEQ ID NO: 116981 - DNA, 44 bp, Artificial Sequence
  primer
gtaaaacgacggccagttgaaataatttaaactaaggtaccagg

SEQ ID NO: 116982 - DNA, 41 bp, Artificial Sequence
  primer
gtaaaacgacggccagtattaatgtgaataagccaaagggt

SEQ ID NO: 116983 - DNA, 21 bp, Artificial Sequence
  primer
ctcctgaatttctccgcagtc

SEQ ID NO: 116984 - DNA, 42 bp, Artificial Sequence
  primer
gtaaaacgacggccagttaaatgtttgtcataagccagtgag

SEQ ID NO: 116985 - DNA, 44 bp, Artificial Sequence
  primer
gtaaaacgacggccagttcctaatagccataaataagacagcac

SEQ ID NO: 116986 - DNA, 35 bp, Artificial Sequence
  primer
gtaaaacgacggccagtaattgcctgaaccgggag

SEQ ID NO: 116987 - DNA, 21 bp, Artificial Sequence
  primer
cattcctgctagccatgttcc

SEQ ID NO: 116988 - DNA, 38 bp, Artificial Sequence
  primer
gtaaaacgacggccagtcataatcatgggaatggcatc

SEQ ID NO: 116989 - DNA, 27 bp, Artificial Sequence
  primer
tgtagtaaccaggcttcattaaatatg

SEQ ID NO: 116990 - DNA, 21 bp, Artificial Sequence
  primer
caggctcatatcaccctttcg

SEQ ID NO: 116991 - DNA, 35 bp, Artificial Sequence
  primer
gtaaaacgacggccagtgcgcatgcttgtaatccc

SEQ ID NO: 116992 - DNA, 27 bp, Artificial Sequence
  primer
gaatcagaatcctactttcttacccag

SEQ ID NO: 116993 - DNA, 38 bp, Artificial Sequence
  primer
gtaaaacgacggccagtcctggactcaagtggtcacaa

SEQ ID NO: 116994 - DNA, 35 bp, Artificial Sequence
  primer
gtaaaacgacggccagtcaaccttgcgatctgccc

SEQ ID NO: 116995 - DNA, 41 bp, Artificial Sequence
  primer
gtaaaacgacggccagtcagagtcacactgtctcaaactcc

SEQ ID NO: 116996 - DNA, 21 bp, Artificial Sequence
  primer
caagtgatccacccacttcag

SEQ ID NO: 116997 - DNA, 39 bp, Artificial Sequence
  primer
gtaaaacgacggccagttcaacatgtttcctacccacac

SEQ ID NO: 116998 - DNA, 40 bp, Artificial Sequence
  primer
gtaaaacgacggccagttcaaatcttataccgaccaatgc

SEQ ID NO: 116999 - DNA, 42 bp, Artificial Sequence
  primer
gtaaaacgacggccagtaattgtttggactttcctagctacc

SEQ ID NO: 117000 - DNA, 24 bp, Artificial Sequence
  primer
tgaaacctgaataagtacaggcaa

SEQ ID NO: 117001 - DNA, 41 bp, Artificial Sequence
  primer
gtaaaacgacggccagttcaaatgtccatactctgatctgc

SEQ ID NO: 117002 - DNA, 21 bp, Artificial Sequence
  primer
ctccagtagcggaaagtcctc

SEQ ID NO: 117003 - DNA, 25 bp, Artificial Sequence
  primer
gacaacagatttgtttcagatttgg

SEQ ID NO: 117004 - DNA, 21 bp, Artificial Sequence
  primer
ctgaatggtggcaatgaactc

SEQ ID NO: 117005 - DNA, 22 bp, Artificial Sequence
  primer
ctggatttgctaagacaagctg

SEQ ID NO: 117006 - DNA, 21 bp, Artificial Sequence
  primer
tgggtatcaacagagcaccaa

SEQ ID NO: 117007 - DNA, 38 bp, Artificial Sequence
  primer
gtaaaacgacggccagtcatctgtgagcctgaagttcc

SEQ ID NO: 117008 - DNA, 38 bp, Artificial Sequence
  primer
gtaaaacgacggccagtaagcatctttctgcttctgcc

SEQ ID NO: 117009 - DNA, 22 bp, Artificial Sequence
  primer
tctgaaggcagtcattcttctg

SEQ ID NO: 117010 - DNA, 38 bp, Artificial Sequence
  primer
gtaaaacgacggccagtgctgaacaatgtgctgctgag

SEQ ID NO: 117011 - DNA, 24 bp, Artificial Sequence
  primer
ttgacaatttcaacattctagcga

SEQ ID NO: 117012 - DNA, 25 bp, Artificial Sequence
  primer
aaacaattccctgaaagctagaaac

SEQ ID NO: 117013 - DNA, 22 bp, Artificial Sequence
  primer
tgggattataggcattaggtgg

SEQ ID NO: 117014 - DNA, 21 bp, Artificial Sequence
  primer
ttccatgggacagaaaggaag

SEQ ID NO: 117015 - DNA, 19 bp, Artificial Sequence
  primer
cagcaaagcaactggcaga

SEQ ID NO: 117016 - DNA, 21 bp, Artificial Sequence
  primer
gtgtgtgaaatccaagggacc

SEQ ID NO: 117017 - DNA, 39 bp, Artificial Sequence
  primer
gtaaaacgacggccagttgcagacctggaagtctctagc

SEQ ID NO: 117018 - DNA, 21 bp, Artificial Sequence
  primer
tcctgtgtttgtgggatcaag

SEQ ID NO: 117019 - DNA, 21 bp, Artificial Sequence
  primer
atttgggatcataaagggcac

SEQ ID NO: 117020 - DNA, 24 bp, Artificial Sequence
  primer
cagaggaacttaatacatgctgcc

SEQ ID NO: 117021 - DNA, 23 bp, Artificial Sequence
  primer
tccactgaagaaatcacatccag

SEQ ID NO: 117022 - DNA, 36 bp, Artificial Sequence
  primer
gtaaaacgacggccagtcatgcatgcttgccagtgt

SEQ ID NO: 117023 - DNA, 21 bp, Artificial Sequence
  primer
gagcaatatttggcaccactg

SEQ ID NO: 117024 - DNA, 22 bp, Artificial Sequence
  primer
tttggaaagagctgaacacaag

SEQ ID NO: 117025 - DNA, 38 bp, Artificial Sequence
  primer
gtaaaacgacggccagtcccagcgaagagaatctgagt

SEQ ID NO: 117026 - DNA, 38 bp, Artificial Sequence
  primer
gtaaaacgacggccagtgtcttcctgccagttctgtcc

SEQ ID NO: 117027 - DNA, 21 bp, Artificial Sequence
  primer
gtaggcccaatcatcttcacc

SEQ ID NO: 117028 - DNA, 20 bp, Artificial Sequence
  primer
agcagaggctacagacgtgg

SEQ ID NO: 117029 - DNA, 20 bp, Artificial Sequence
  primer
gatccagatgggaggacgag

SEQ ID NO: 117030 - DNA, 37 bp, Artificial Sequence
  primer
gtaaaacgacggccagtcactctggtcctcaaatggg

SEQ ID NO: 117031 - DNA, 20 bp, Artificial Sequence
  primer
catctaaggagaagcggctg

SEQ ID NO: 117032 - DNA, 39 bp, Artificial Sequence
  primer
gtaaaacgacggccagtaacaataaccagccagacatcc

SEQ ID NO: 117033 - DNA, 20 bp, Artificial Sequence
  primer
ccttggctcaattgtccttg

SEQ ID NO: 117034 - DNA, 38 bp, Artificial Sequence
  primer
gtaaaacgacggccagtaagttcggtccctctcctttc

SEQ ID NO: 117035 - DNA, 23 bp, Artificial Sequence
  primer
tgaagtttgatactttggatgcg

SEQ ID NO: 117036 - DNA, 20 bp, Artificial Sequence
  primer
ctgtggctcaggacagcaag

SEQ ID NO: 117037 - DNA, 22 bp, Artificial Sequence
  primer
tgggatctggaagcattatcac

SEQ ID NO: 117038 - DNA, 38 bp, Artificial Sequence
  primer
gtaaaacgacggccagttacatcggagactgctttccc

SEQ ID NO: 117039 - DNA, 38 bp, Artificial Sequence
  primer
gtaaaacgacggccagtagatgcagcttccctttcttg

SEQ ID NO: 117040 - DNA, 21 bp, Artificial Sequence
  primer
agacagacacacacgtgaccc

SEQ ID NO: 117041 - DNA, 21 bp, Artificial Sequence
  primer
cagtggagcagaggaggaaac

SEQ ID NO: 117042 - DNA, 38 bp, Artificial Sequence
  primer
gtaaaacgacggccagtgtttggtgaacaagggtctcc

SEQ ID NO: 117043 - DNA, 21 bp, Artificial Sequence
  primer
gtctgtcatttcaaggcctcc

SEQ ID NO: 117044 - DNA, 37 bp, Artificial Sequence
  primer
gtaaaacgacggccagtgctctccctccgtctgtgtc

SEQ ID NO: 117045 - DNA, 21 bp, Artificial Sequence
  primer
attcaggctccctcttatccc

SEQ ID NO: 117046 - DNA, 38 bp, Artificial Sequence
  primer
gtaaaacgacggccagttccaaatgcaactgtagcctc

SEQ ID NO: 117047 - DNA, 22 bp, Artificial Sequence
  primer
gaactggctgctccacagtaac

SEQ ID NO: 117048 - DNA, 19 bp, Artificial Sequence
  primer
ggtcgctcagtctgtgtgg

SEQ ID NO: 117049 - DNA, 21 bp, Artificial Sequence
  primer
cccaaatttgccctcagtatc

SEQ ID NO: 117050 - DNA, 27 bp, Artificial Sequence
  primer
cacatctataaactgaactgggacaag

SEQ ID NO: 117051 - DNA, 21 bp, Artificial Sequence
  primer
gaaatgagtggatggtgttgg

SEQ ID NO: 117052 - DNA, 21 bp, Artificial Sequence
  primer
aatgtagcgtggactgcaaag

SEQ ID NO: 117053 - DNA, 21 bp, Artificial Sequence
  primer
gaggtaccttggagcaggttc

SEQ ID NO: 117054 - DNA, 38 bp, Artificial Sequence
  primer
gtaaaacgacggccagttggtactcacattctcgtcgc

SEQ ID NO: 117055 - DNA, 21 bp, Artificial Sequence
  primer
aaggcaatgagcaaagtaggc

SEQ ID NO: 117056 - DNA, 20 bp, Artificial Sequence
  primer
actgctcctgtcctcaaccc

SEQ ID NO: 117057 - DNA, 21 bp, Artificial Sequence
  primer
tacgagatcccatctgcactc

SEQ ID NO: 117058 - DNA, 38 bp, Artificial Sequence
  primer
gtaaaacgacggccagtcctggcacaccacataaacac

SEQ ID NO: 117059 - DNA, 37 bp, Artificial Sequence
  primer
gtaaaacgacggccagtacagtgccctgtgttcatgg

SEQ ID NO: 117060 - DNA, 38 bp, Artificial Sequence
  primer
gtaaaacgacggccagttgagttctgaggaacaccctg

SEQ ID NO: 117061 - DNA, 38 bp, Artificial Sequence
  primer
gtaaaacgacggccagtgggagtcaaacaaatcaaggc

SEQ ID NO: 117062 - DNA, 36 bp, Artificial Sequence
  primer
gtaaaacgacggccagtgcacaagaccaggagggtc

SEQ ID NO: 117063 - DNA, 21 bp, Artificial Sequence
  primer
cacctttaggcgacactcctc

SEQ ID NO: 117064 - DNA, 21 bp, Artificial Sequence
  primer
ccaacttccactcaaacctgg

SEQ ID NO: 117065 - DNA, 38 bp, Artificial Sequence
  primer
gtaaaacgacggccagtcatctgggaagagaagtggtg

SEQ ID NO: 117066 - DNA, 21 bp, Artificial Sequence
  primer
tgcgtatcatgaaagtcaccc

SEQ ID NO: 117067 - DNA, 19 bp, Artificial Sequence
  primer
gattcacgcctcccagatg

SEQ ID NO: 117068 - DNA, 21 bp, Artificial Sequence
  primer
gactcagggaacctgcatctc

SEQ ID NO: 117069 - DNA, 20 bp, Artificial Sequence
  primer
accaaagggctcagacttcc

SEQ ID NO: 117070 - DNA, 21 bp, Artificial Sequence
  primer
ttctgaccagccatcacaatc

SEQ ID NO: 117071 - DNA, 20 bp, Artificial Sequence
  primer
catttcagtgtctggcctgg

SEQ ID NO: 117072 - DNA, 38 bp, Artificial Sequence
  primer
gtaaaacgacggccagttctccacttagacccaccagg

SEQ ID NO: 117073 - DNA, 36 bp, Artificial Sequence
  primer
gtaaaacgacggccagtcctggtacctgaggccctg

SEQ ID NO: 117074 - DNA, 20 bp, Artificial Sequence
  primer
caggttcagcccttctcttg

SEQ ID NO: 117075 - DNA, 21 bp, Artificial Sequence
  primer
gagtctagtctggagcagccc

SEQ ID NO: 117076 - DNA, 21 bp, Artificial Sequence
  primer
cagagcaatgaaactgcatcc

SEQ ID NO: 117077 - DNA, 20 bp, Artificial Sequence
  primer
gatcagtgacgggtggtcag

SEQ ID NO: 117078 - DNA, 20 bp, Artificial Sequence
  primer
tgatgtctcctccatcctgg

SEQ ID NO: 117079 - DNA, 18 bp, Artificial Sequence
  primer
tcaggtgatccacgcacc

SEQ ID NO: 117080 - DNA, 20 bp, Artificial Sequence
  primer
aggagtgagcacggctaatg

SEQ ID NO: 117081 - DNA, 38 bp, Artificial Sequence
  primer
gtaaaacgacggccagtagctcagatttgtttcctggg

SEQ ID NO: 117082 - DNA, 21 bp, Artificial Sequence
  primer
tgaaacaaacagctgggattg

SEQ ID NO: 117083 - DNA, 21 bp, Artificial Sequence
  primer
aagatggagggagaagatggc

SEQ ID NO: 117084 - DNA, 21 bp, Artificial Sequence
  primer
aaagtgcaatggaattgggtc

SEQ ID NO: 117085 - DNA, 20 bp, Artificial Sequence
  primer
atccctggaaataggcaacg

SEQ ID NO: 117086 - DNA, 21 bp, Artificial Sequence
  primer
actttgcagacatagggaggg

SEQ ID NO: 117087 - DNA, 21 bp, Artificial Sequence
  primer
gttgggctaagggagggtatg

SEQ ID NO: 117088 - DNA, 21 bp, Artificial Sequence
  primer
cctcaggactggaagatgatg

SEQ ID NO: 117089 - DNA, 21 bp, Artificial Sequence
  primer
attgtaaacctgttgcccgtc

SEQ ID NO: 117090 - DNA, 38 bp, Artificial Sequence
  primer
gtaaaacgacggccagtacctgggaaagaagaccactg

SEQ ID NO: 117091 - DNA, 38 bp, Artificial Sequence
  primer
gtaaaacgacggccagttggtgaggaaacagggcttac

SEQ ID NO: 117092 - DNA, 21 bp, Artificial Sequence
  primer
agaggaaagggctagcctcag

SEQ ID NO: 117093 - DNA, 21 bp, Artificial Sequence
  primer
aaagggcctcctctttctgag

SEQ ID NO: 117094 - DNA, 21 bp, Artificial Sequence
  primer
acctggaccctgatttcaaag

SEQ ID NO: 117095 - DNA, 21 bp, Artificial Sequence
  primer
cccttccacaaatcctgtctc

SEQ ID NO: 117096 - DNA, 38 bp, Artificial Sequence
  primer
gtaaaacgacggccagtaaatctgtctgggtgctttgg

SEQ ID NO: 117097 - DNA, 21 bp, Artificial Sequence
  primer
atggaggctttgacacgaaag

SEQ ID NO: 117098 - DNA, 22 bp, Artificial Sequence
  primer
aagggaatcctctgggtatgtc

SEQ ID NO: 117099 - DNA, 41 bp, Artificial Sequence
  primer
gtaaaacgacggccagtgcagacatccctagaataccaatg

SEQ ID NO: 117100 - DNA, 38 bp, Artificial Sequence
  primer
gtaaaacgacggccagtctgcatgatcttcttgatccg

SEQ ID NO: 117101 - DNA, 35 bp, Artificial Sequence
  primer
gtaaaacgacggccagtggctgaggagcgtcaagg

SEQ ID NO: 117102 - DNA, 20 bp, Artificial Sequence
  primer
gctctgccttcctcagtgtg

SEQ ID NO: 117103 - DNA, 21 bp, Artificial Sequence
  primer
gaaggtacagtccatctgccc

SEQ ID NO: 117104 - DNA, 21 bp, Artificial Sequence
  primer
cagggacagcagtagaccctc

SEQ ID NO: 117105 - DNA, 21 bp, Artificial Sequence
  primer
tctgccacaatcaacaagacc

SEQ ID NO: 117106 - DNA, 39 bp, Artificial Sequence
  primer
gtaaaacgacggccagtcagctctaccttctctcctccc

SEQ ID NO: 117107 - DNA, 37 bp, Artificial Sequence
  primer
gtaaaacgacggccagtagagcagcaggtgaagggag

SEQ ID NO: 117108 - DNA, 43 bp, Artificial Sequence
  primer
gtaaaacgacggccagtccaacaacatttcagatttagtaccc

SEQ ID NO: 117109 - DNA, 27 bp, Artificial Sequence
  primer
aatacccaaagtatgcatttcacttac

SEQ ID NO: 117110 - DNA, 43 bp, Artificial Sequence
  primer
gtaaaacgacggccagttcactaggtgaaatttatagatgccc

SEQ ID NO: 117111 - DNA, 23 bp, Artificial Sequence
  primer
ttccagggctttgtttattaagg

SEQ ID NO: 117112 - DNA, 40 bp, Artificial Sequence
  primer
gtaaaacgacggccagttcacctgagaggtcaattgtttc

SEQ ID NO: 117113 - DNA, 42 bp, Artificial Sequence
  primer
gtaaaacgacggccagtcttccacagatatttagcctttcag

SEQ ID NO: 117114 - DNA, 39 bp, Artificial Sequence
  primer
gtaaaacgacggccagtcagagatggcttctggaatacg

SEQ ID NO: 117115 - DNA, 21 bp, Artificial Sequence
  primer
tgggctatgagtcatttggtg

SEQ ID NO: 117116 - DNA, 38 bp, Artificial Sequence
  primer
gtaaaacgacggccagtcacaagtagccatccatcagg

SEQ ID NO: 117117 - DNA, 43 bp, Artificial Sequence
  primer
gtaaaacgacggccagtttcaaataaattgtcacacacaactc

SEQ ID NO: 117118 - DNA, 38 bp, Artificial Sequence
  primer
gtaaaacgacggccagtctttccatgtgttgggtaggc

SEQ ID NO: 117119 - DNA, 24 bp, Artificial Sequence
  primer
ccgtccttgaatttaagaaagatg

SEQ ID NO: 117120 - DNA, 21 bp, Artificial Sequence
  primer
ggcaacaagagctaaactccg

SEQ ID NO: 117121 - DNA, 38 bp, Artificial Sequence
  primer
gtaaaacgacggccagtctccacagctctttcttccag

SEQ ID NO: 117122 - DNA, 38 bp, Artificial Sequence
  primer
gtaaaacgacggccagtacctgattgatgcttcattgg

SEQ ID NO: 117123 - DNA, 38 bp, Artificial Sequence
  primer
gtaaaacgacggccagtaatacggatgaaagacccagg

SEQ ID NO: 117124 - DNA, 38 bp, Artificial Sequence
  primer
gtaaaacgacggccagtcactgatcaggatgaaggctg

SEQ ID NO: 117125 - DNA, 21 bp, Artificial Sequence
  primer
ttcgacaggctttccattacc

SEQ ID NO: 117126 - DNA, 21 bp, Artificial Sequence
  primer
agggcaaagtctgtagcatcc

SEQ ID NO: 117127 - DNA, 21 bp, Artificial Sequence
  primer
gatgggttggatcttctccag

SEQ ID NO: 117128 - DNA, 38 bp, Artificial Sequence
  primer
gtaaaacgacggccagttgacacctcagagtctcaccg

SEQ ID NO: 117129 - DNA, 21 bp, Artificial Sequence
  primer
tctactgcacctgggaagagg

SEQ ID NO: 117130 - DNA, 21 bp, Artificial Sequence
  primer
atgactcactgccaccctctc

SEQ ID NO: 117131 - DNA, 21 bp, Artificial Sequence
  primer
aacaggaacatggctttggag

SEQ ID NO: 117132 - DNA, 19 bp, Artificial Sequence
  primer
gaggccaggaagagacctg

SEQ ID NO: 117133 - DNA, 21 bp, Artificial Sequence
  primer
aagcaccaggaaactcattgg

SEQ ID NO: 117134 - DNA, 21 bp, Artificial Sequence
  primer
ggagtgtgtgctctcctagcc

SEQ ID NO: 117135 - DNA, 21 bp, Artificial Sequence
  primer
tagtgataggcctccattggg

SEQ ID NO: 117136 - DNA, 21 bp, Artificial Sequence
  primer
ctcctgggaattcctttagcc

SEQ ID NO: 117137 - DNA, 38 bp, Artificial Sequence
  primer
gtaaaacgacggccagtgtacacatccatgccttgcag

SEQ ID NO: 117138 - DNA, 21 bp, Artificial Sequence
  primer
ccatggttaggaaggacatgg

SEQ ID NO: 117139 - DNA, 35 bp, Artificial Sequence
  primer
gtaaaacgacggccagtcttcctgctcacggttcg

SEQ ID NO: 117140 - DNA, 35 bp, Artificial Sequence
  primer
gtaaaacgacggccagtcccaaaggccagaactca

SEQ ID NO: 117141 - DNA, 21 bp, Artificial Sequence
  primer
ggtcgttatttcccacctgtc

SEQ ID NO: 117142 - DNA, 21 bp, Artificial Sequence
  primer
agggctgagcacaactcacag

SEQ ID NO: 117143 - DNA, 21 bp, Artificial Sequence
  primer
aaatcatgcactgctggacac

SEQ ID NO: 117144 - DNA, 39 bp, Artificial Sequence
  primer
gtaaaacgacggccagttccgatagcatcttctaccagc

SEQ ID NO: 117145 - DNA, 38 bp, Artificial Sequence
  primer
gtaaaacgacggccagttgcacagtctttctgagtggg

SEQ ID NO: 117146 - DNA, 36 bp, Artificial Sequence
  primer
gtaaaacgacggccagtggtcctccgtagggacagg

SEQ ID NO: 117147 - DNA, 20 bp, Artificial Sequence
  primer
agtagaccacgtagtcgcgg

SEQ ID NO: 117148 - DNA, 21 bp, Artificial Sequence
  primer
gggtaggaagaaggagcacac

SEQ ID NO: 117149 - DNA, 35 bp, Artificial Sequence
  primer
gtaaaacgacggccagtgacaggaacccaccgacc

SEQ ID NO: 117150 - DNA, 19 bp, Artificial Sequence
  primer
gtccagcacagcaggaagg

SEQ ID NO: 117151 - DNA, 38 bp, Artificial Sequence
  primer
gtaaaacgacggccagtttcacagctgagtttgggaag

SEQ ID NO: 117152 - DNA, 38 bp, Artificial Sequence
  primer
gtaaaacgacggccagtgaccggaatgaaggagatgag

SEQ ID NO: 117153 - DNA, 21 bp, Artificial Sequence
  primer
gaccggaatgaaggagatgag

SEQ ID NO: 117154 - DNA, 21 bp, Artificial Sequence
  primer
gaagacgtcgaaggtggtctc

SEQ ID NO: 117155 - DNA, 21 bp, Artificial Sequence
  primer
aaacaccttctgaaagtcggc

SEQ ID NO: 117156 - DNA, 21 bp, Artificial Sequence
  primer
gcatgtatttgcgtgtgtgtg

SEQ ID NO: 117157 - DNA, 21 bp, Artificial Sequence
  primer
acgatagacccaacgcatgac

SEQ ID NO: 117158 - DNA, 39 bp, Artificial Sequence
  primer
gtaaaacgacggccagtttcccaagtatgtggtaccgtc

SEQ ID NO: 117159 - DNA, 21 bp, Artificial Sequence
  primer
tatgcacagttgcaaagaccc

SEQ ID NO: 117160 - DNA, 41 bp, Artificial Sequence
  primer
gtaaaacgacggccagtcaagtgggagtattcacatttcac

SEQ ID NO: 117161 - DNA, 38 bp, Artificial Sequence
  primer
gtaaaacgacggccagtgcatttggacttcagtgatgc

SEQ ID NO: 117162 - DNA, 38 bp, Artificial Sequence
  primer
gtaaaacgacggccagtcctcacactatgtgacctggc

SEQ ID NO: 117163 - DNA, 38 bp, Artificial Sequence
  primer
gtaaaacgacggccagtcaagtgatctatccacctcgg

SEQ ID NO: 117164 - DNA, 40 bp, Artificial Sequence
  primer
gtaaaacgacggccagtggagatatgtgaagttcccactg

SEQ ID NO: 117165 - DNA, 18 bp, Artificial Sequence
  primer
agccgtcccgcacaatag

SEQ ID NO: 117166 - DNA, 38 bp, Artificial Sequence
  primer
gtaaaacgacggccagtaccaactgccaaggttctgac

SEQ ID NO: 117167 - DNA, 47 bp, Artificial Sequence
  primer
gtaaaacgacggccagtttctctacatttccagttaattatgtatga

SEQ ID NO: 117168 - DNA, 23 bp, Artificial Sequence
  primer
ctggattactttaaactgcaggc

SEQ ID NO: 117169 - DNA, 21 bp, Artificial Sequence
  primer
tgtgaacacagaccctcttcc

SEQ ID NO: 117170 - DNA, 21 bp, Artificial Sequence
  primer
gttcctctgccaccttcattc

SEQ ID NO: 117171 - DNA, 20 bp, Artificial Sequence
  primer
ggtgaagtggctcacacctg

SEQ ID NO: 117172 - DNA, 21 bp, Artificial Sequence
  primer
gtggtgtgtgcctgtcatctc

SEQ ID NO: 117173 - DNA, 23 bp, Artificial Sequence
  primer
tgctgaggtgtttagatccagag

SEQ ID NO: 117174 - DNA, 20 bp, Artificial Sequence
  primer
ttggtaggctccagagttgg

SEQ ID NO: 117175 - DNA, 21 bp, Artificial Sequence
  primer
gagtatttctggcttccggtg

SEQ ID NO: 117176 - DNA, 21 bp, Artificial Sequence
  primer
tctttcagaatggccaggaag

SEQ ID NO: 117177 - DNA, 21 bp, Artificial Sequence
  primer
ctccagaaacctgaggaccag

SEQ ID NO: 117178 - DNA, 38 bp, Artificial Sequence
  primer
gtaaaacgacggccagtgatgaaggtgcagggttaagg

SEQ ID NO: 117179 - DNA, 21 bp, Artificial Sequence
  primer
attcccaaatctgaccagcag

SEQ ID NO: 117180 - DNA, 38 bp, Artificial Sequence
  primer
gtaaaacgacggccagttcgcataggaaggactcatcc

SEQ ID NO: 117181 - DNA, 21 bp, Artificial Sequence
  primer
caccaacctgagggtctcttc

SEQ ID NO: 117182 - DNA, 38 bp, Artificial Sequence
  primer
gtaaaacgacggccagtggtccaggtacctcaccagtc

SEQ ID NO: 117183 - DNA, 38 bp, Artificial Sequence
  primer
gtaaaacgacggccagtgggtacacggatgtgaggttc

SEQ ID NO: 117184 - DNA, 38 bp, Artificial Sequence
  primer
gtaaaacgacggccagtggagtggaaaggagtctgagc

SEQ ID NO: 117185 - DNA, 38 bp, Artificial Sequence
  primer
gtaaaacgacggccagtgactcctaatcgtggcagagg

SEQ ID NO: 117186 - DNA, 21 bp, Artificial Sequence
  primer
actgcactgggccatctttag

SEQ ID NO: 117187 - DNA, 38 bp, Artificial Sequence
  primer
gtaaaacgacggccagtaagatcaggcctggcatacag

SEQ ID NO: 117188 - DNA, 39 bp, Artificial Sequence
  primer
gtaaaacgacggccagtgaaactatgcccttcactgtgg

SEQ ID NO: 117189 - DNA, 41 bp, Artificial Sequence
  primer
gtaaaacgacggccagtctgagactggctcctatcctaatc

SEQ ID NO: 117190 - DNA, 40 bp, Artificial Sequence
  primer
gtaaaacgacggccagtaacttctgccagattcaagatcc

SEQ ID NO: 117191 - DNA, 21 bp, Artificial Sequence
  primer
ggacaacctccaacttaaggg

SEQ ID NO: 117192 - DNA, 21 bp, Artificial Sequence
  primer
tttcagtagcctccttcctgc

SEQ ID NO: 117193 - DNA, 37 bp, Artificial Sequence
  primer
gtaaaacgacggccagtatcctgatccagtgactgcc

SEQ ID NO: 117194 - DNA, 21 bp, Artificial Sequence
  primer
acttgtctggcaacttctccg

SEQ ID NO: 117195 - DNA, 21 bp, Artificial Sequence
  primer
aggtcttctgtgtccctggag

SEQ ID NO: 117196 - DNA, 21 bp, Artificial Sequence
  primer
catccacccagactcacacac

SEQ ID NO: 117197 - DNA, 21 bp, Artificial Sequence
  primer
agtgatctccatgacagccac

SEQ ID NO: 117198 - DNA, 21 bp, Artificial Sequence
  primer
acaagccttgaggagaagacg

SEQ ID NO: 117199 - DNA, 21 bp, Artificial Sequence
  primer
cgagttaaaggagatgccacc

SEQ ID NO: 117200 - DNA, 21 bp, Artificial Sequence
  primer
cagtgcccagtacttggtgag

SEQ ID NO: 117201 - DNA, 21 bp, Artificial Sequence
  primer
gaaccctggtttcaagctctc

SEQ ID NO: 117202 - DNA, 21 bp, Artificial Sequence
  primer
ctcatggacaaagtgctctgc

SEQ ID NO: 117203 - DNA, 21 bp, Artificial Sequence
  primer
gattcaggtccctaatgctcc

SEQ ID NO: 117204 - DNA, 37 bp, Artificial Sequence
  primer
gtaaaacgacggccagtctcggcacatggctaagaag

SEQ ID NO: 117205 - DNA, 38 bp, Artificial Sequence
  primer
gtaaaacgacggccagtcagagagtgtgaatgccttgc

SEQ ID NO: 117206 - DNA, 39 bp, Artificial Sequence
  primer
gtaaaacgacggccagttctgtttgggtgtttgtgtgtc

SEQ ID NO: 117207 - DNA, 21 bp, Artificial Sequence
  primer
cctcctccaacccatgtttac

SEQ ID NO: 117208 - DNA, 39 bp, Artificial Sequence
  primer
gtaaaacgacggccagtcagcacaggtctaaagcatttc

SEQ ID NO: 117209 - DNA, 41 bp, Artificial Sequence
  primer
gtaaaacgacggccagtcaccactattcagctgtatggaac

SEQ ID NO: 117210 - DNA, 41 bp, Artificial Sequence
  primer
gtaaaacgacggccagttgatctgcggtatatgtagctttg

SEQ ID NO: 117211 - DNA, 21 bp, Artificial Sequence
  primer
acaattaggcactgagctggc

SEQ ID NO: 117212 - DNA, 36 bp, Artificial Sequence
  primer
gtaaaacgacggccagtacttccacctcctgggctc

SEQ ID NO: 117213 - DNA, 38 bp, Artificial Sequence
  primer
gtaaaacgacggccagtccacatcatttgcctcattct

SEQ ID NO: 117214 - DNA, 21 bp, Artificial Sequence
  primer
tctggctccagagccttctac

SEQ ID NO: 117215 - DNA, 38 bp, Artificial Sequence
  primer
gtaaaacgacggccagtggagagactggctacttgcag

SEQ ID NO: 117216 - DNA, 38 bp, Artificial Sequence
  primer
gtaaaacgacggccagtgcagagcctttgtcacacttc

SEQ ID NO: 117217 - DNA, 21 bp, Artificial Sequence
  primer
tccaccagtgcaaattgtttc

SEQ ID NO: 117218 - DNA, 42 bp, Artificial Sequence
  primer
gtaaaacgacggccagttttcacacaacttatcatggacatc

SEQ ID NO: 117219 - DNA, 38 bp, Artificial Sequence
  primer
gtaaaacgacggccagtaaactggcattcaatggtttg

SEQ ID NO: 117220 - DNA, 21 bp, Artificial Sequence
  primer
tgcccatcatatcctcatttc

SEQ ID NO: 117221 - DNA, 22 bp, Artificial Sequence
  primer
tgatcagcattacaaacccttc

SEQ ID NO: 117222 - DNA, 21 bp, Artificial Sequence
  primer
cagaaatcatcccacagcaac

SEQ ID NO: 117223 - DNA, 21 bp, Artificial Sequence
  primer
ctcccaaagtgctgggattac

SEQ ID NO: 117224 - DNA, 41 bp, Artificial Sequence
  primer
gtaaaacgacggccagttttggtgactacttgatgtgcttc

SEQ ID NO: 117225 - DNA, 41 bp, Artificial Sequence
  primer
gtaaaacgacggccagtacacccattcatttaaatcacacc

SEQ ID NO: 117226 - DNA, 38 bp, Artificial Sequence
  primer
gtaaaacgacggccagtctccaacggacttctcatctg

SEQ ID NO: 117227 - DNA, 38 bp, Artificial Sequence
  primer
gtaaaacgacggccagtagaactcagccactttgggag

SEQ ID NO: 117228 - DNA, 21 bp, Artificial Sequence
  primer
aaatcccaggaagatgtagcg

SEQ ID NO: 117229 - DNA, 38 bp, Artificial Sequence
  primer
gtaaaacgacggccagttagacatgggccctattcagc

SEQ ID NO: 117230 - DNA, 39 bp, Artificial Sequence
  primer
gtaaaacgacggccagttgcttggaaatacgatgacctc

SEQ ID NO: 117231 - DNA, 46 bp, Artificial Sequence
  primer
gtaaaacgacggccagtatattctattacagttgttgaaagaacca

SEQ ID NO: 117232 - DNA, 38 bp, Artificial Sequence
  primer
gtaaaacgacggccagtccaggagcatgggaaatgtag

SEQ ID NO: 117233 - DNA, 25 bp, Artificial Sequence
  primer
tcaaacttgaaatgagagttggaag

SEQ ID NO: 117234 - DNA, 38 bp, Artificial Sequence
  primer
gtaaaacgacggccagtcattcatgtctgggtggtagc

SEQ ID NO: 117235 - DNA, 22 bp, Artificial Sequence
  primer
cagctgcctcattctctaactg

SEQ ID NO: 117236 - DNA, 21 bp, Artificial Sequence
  primer
cctgcagcagagttgagactt

SEQ ID NO: 117237 - DNA, 18 bp, Artificial Sequence
  primer
tgatccacccacctcagc

SEQ ID NO: 117238 - DNA, 37 bp, Artificial Sequence
  primer
gtaaaacgacggccagtttgctgctcgcaattaaacc

SEQ ID NO: 117239 - DNA, 21 bp, Artificial Sequence
  primer
atcaccctggcatgaagaaag

SEQ ID NO: 117240 - DNA, 21 bp, Artificial Sequence
  primer
ggtctggaaagtctcaaagcg

SEQ ID NO: 117241 - DNA, 26 bp, Artificial Sequence
  primer
aaacaaatttaaagatcaggtcactg

SEQ ID NO: 117242 - DNA, 39 bp, Artificial Sequence
  primer
gtaaaacgacggccagtatacaacagtagcaaacgtggg

SEQ ID NO: 117243 - DNA, 40 bp, Artificial Sequence
  primer
gtaaaacgacggccagtccaaggaaagagaagcttaaacc

SEQ ID NO: 117244 - DNA, 22 bp, Artificial Sequence
  primer
catcaacacaaacaccaccaac

SEQ ID NO: 117245 - DNA, 21 bp, Artificial Sequence
  primer
aacccaaatgtccaacaatga

SEQ ID NO: 117246 - DNA, 39 bp, Artificial Sequence
  primer
gtaaaacgacggccagtgggaataagttgaatgtcacca

SEQ ID NO: 117247 - DNA, 21 bp, Artificial Sequence
  primer
ccaagagcctcagtgtgacag

SEQ ID NO: 117248 - DNA, 22 bp, Artificial Sequence
  primer
ttcgaaaccacagcaagttatg

SEQ ID NO: 117249 - DNA, 38 bp, Artificial Sequence
  primer
gtaaaacgacggccagttaaagacaggcccaaagttcc

SEQ ID NO: 117250 - DNA, 21 bp, Artificial Sequence
  primer
agagtgcccatctcgctttag

SEQ ID NO: 117251 - DNA, 38 bp, Artificial Sequence
  primer
gtaaaacgacggccagtgaacagtgtttcagtttgccc

SEQ ID NO: 117252 - DNA, 21 bp, Artificial Sequence
  primer
ggctgttgtcactgctacctc

SEQ ID NO: 117253 - DNA, 21 bp, Artificial Sequence
  primer
gggcaaagcatcagtaagacc

SEQ ID NO: 117254 - DNA, 38 bp, Artificial Sequence
  primer
gtaaaacgacggccagtagcttgagcccaaatacaacc

SEQ ID NO: 117255 - DNA, 38 bp, Artificial Sequence
  primer
gtaaaacgacggccagtggctcaagtaatcctcccacc

SEQ ID NO: 117256 - DNA, 38 bp, Artificial Sequence
  primer
gtaaaacgacggccagtttcacctgtaattgacccacc

SEQ ID NO: 117257 - DNA, 21 bp, Artificial Sequence
  primer
acgacacaaggtggtcttcag

SEQ ID NO: 117258 - DNA, 38 bp, Artificial Sequence
  primer
gtaaaacgacggccagtaacggctatatgaagccaagc

SEQ ID NO: 117259 - DNA, 42 bp, Artificial Sequence
  primer
gtaaaacgacggccagtcagagtggaattcctacagatgctc

SEQ ID NO: 117260 - DNA, 18 bp, Artificial Sequence
  primer
gcgcccggcctatattac

SEQ ID NO: 117261 - DNA, 21 bp, Artificial Sequence
  primer
catgcctggctataatgctca

SEQ ID NO: 117262 - DNA, 23 bp, Artificial Sequence
  primer
accaaacaggactttgaaaggta

SEQ ID NO: 117263 - DNA, 21 bp, Artificial Sequence
  primer
ggctggcccgaagatagttac

SEQ ID NO: 117264 - DNA, 18 bp, Artificial Sequence
  primer
attacaggcacccgcaac

SEQ ID NO: 117265 - DNA, 38 bp, Artificial Sequence
  primer
gtaaaacgacggccagtatgttattgctgcagtttggg

SEQ ID NO: 117266 - DNA, 37 bp, Artificial Sequence
  primer
gtaaaacgacggccagtcagggagggaggacagaaag

SEQ ID NO: 117267 - DNA, 37 bp, Artificial Sequence
  primer
gtaaaacgacggccagtgctcaaacccttgatcctcc

SEQ ID NO: 117268 - DNA, 21 bp, Artificial Sequence
  primer
gggtgacagagtgagaccttg

SEQ ID NO: 117269 - DNA, 37 bp, Artificial Sequence
  primer
gtaaaacgacggccagtctgagccttaggaagcgtgg

SEQ ID NO: 117270 - DNA, 20 bp, Artificial Sequence
  primer
ggagaagtgggtgggctaag

SEQ ID NO: 117271 - DNA, 38 bp, Artificial Sequence
  primer
gtaaaacgacggccagttgggtgtctgtcagggtactg

SEQ ID NO: 117272 - DNA, 21 bp, Artificial Sequence
  primer
ccaactttggatggactcctg

SEQ ID NO: 117273 - DNA, 40 bp, Artificial Sequence
  primer
gtaaaacgacggccagtgcagaaacattgtcagtgtctgg

SEQ ID NO: 117274 - DNA, 21 bp, Artificial Sequence
  primer
tcccatgcagatcctatttcc

SEQ ID NO: 117275 - DNA, 21 bp, Artificial Sequence
  primer
actgcttctcggatgtcaagg

SEQ ID NO: 117276 - DNA, 38 bp, Artificial Sequence
  primer
gtaaaacgacggccagtgtaaacccaagatgccaaagc

SEQ ID NO: 117277 - DNA, 20 bp, Artificial Sequence
  primer
tccacattgtttcaaatggc

SEQ ID NO: 117278 - DNA, 38 bp, Artificial Sequence
  primer
gtaaaacgacggccagtagcatattgcaggctttggag

SEQ ID NO: 117279 - DNA, 38 bp, Artificial Sequence
  primer
gtaaaacgacggccagttcacaaagttgatcccagcag

SEQ ID NO: 117280 - DNA, 21 bp, Artificial Sequence
  primer
tttgcaacagtgtgaaccaag

SEQ ID NO: 117281 - DNA, 22 bp, Artificial Sequence
  primer
gcctagctcgtagtcctccttc

SEQ ID NO: 117282 - DNA, 25 bp, Artificial Sequence
  primer
aggtgctcttacacctatgttcttc

SEQ ID NO: 117283 - DNA, 37 bp, Artificial Sequence
  primer
gtaaaacgacggccagtaaacaatgagccaatgctgg

SEQ ID NO: 117284 - DNA, 21 bp, Artificial Sequence
  primer
attatggacatgggcaagagc

SEQ ID NO: 117285 - DNA, 21 bp, Artificial Sequence
  primer
agcaggatcattggctttgag

SEQ ID NO: 117286 - DNA, 22 bp, Artificial Sequence
  primer
gaaagcagccttccttccttag

SEQ ID NO: 117287 - DNA, 22 bp, Artificial Sequence
  primer
gctaggatgtagaagtgcctgg

SEQ ID NO: 117288 - DNA, 38 bp, Artificial Sequence
  primer
gtaaaacgacggccagtttgtgtcttctttgccacagc

SEQ ID NO: 117289 - DNA, 38 bp, Artificial Sequence
  primer
gtaaaacgacggccagtagaggagaaaccagtcccagc

SEQ ID NO: 117290 - DNA, 38 bp, Artificial Sequence
  primer
gtaaaacgacggccagtagtggaaactggaaaggttgg

SEQ ID NO: 117291 - DNA, 40 bp, Artificial Sequence
  primer
gtaaaacgacggccagtccagagaacctttgccttcatag

SEQ ID NO: 117292 - DNA, 21 bp, Artificial Sequence
  primer
ctgaatcccaagcctctcaac

SEQ ID NO: 117293 - DNA, 38 bp, Artificial Sequence; identical to SEQ ID NO: 18221
  primer

SEQ ID NO: 117294 - DNA, 21 bp, Artificial Sequence
  primer
gtttgtaaatggctctgccac

SEQ ID NO: 117295 - DNA, 40 bp, Artificial Sequence
  primer
gtaaaacgacggccagttgattcaatatgctgtgcaattc

SEQ ID NO: 117296 - DNA, 20 bp, Artificial Sequence
  primer
cccgccacttcccttattat

SEQ ID NO: 117297 - DNA, 39 bp, Artificial Sequence
  primer
gtaaaacgacggccagttgctcagagtcaattaccaccc

SEQ ID NO: 117298 - DNA, 21 bp, Artificial Sequence
  primer
gccatattgcaacttctctcg

SEQ ID NO: 117299 - DNA, 21 bp, Artificial Sequence
  primer
cacatgagctacgtctagggc

SEQ ID NO: 117300 - DNA, 39 bp, Artificial Sequence
  primer
gtaaaacgacggccagttataaatcatttggccttgcac

SEQ ID NO: 117301 - DNA, 20 bp, Artificial Sequence
  primer
acggtcaaatcaaagaaggg

SEQ ID NO: 117302 - DNA, 22 bp, Artificial Sequence
  primer
gatgcactgaagcctaaactgg

SEQ ID NO: 117303 - DNA, 26 bp, Artificial Sequence
  primer
tcagaacaagagtctaagctcatcac

SEQ ID NO: 117304 - DNA, 38 bp, Artificial Sequence
  primer
gtaaaacgacggccagtaagaacacacttcccaaaggc

SEQ ID NO: 117305 - DNA, 38 bp, Artificial Sequence
  primer
gtaaaacgacggccagtctgagggcacttgaaactctg

SEQ ID NO: 117306 - DNA, 42 bp, Artificial Sequence
  primer
gtaaaacgacggccagttgttgaattccaggtatatgaggag

SEQ ID NO: 117307 - DNA, 42 bp, Artificial Sequence
  primer
gtaaaacgacggccagtcatggaagttataccagacaaggag

SEQ ID NO: 117308 - DNA, 38 bp, Artificial Sequence
  primer
gtaaaacgacggccagttgcaacaacctacagacccag

SEQ ID NO: 117309 - DNA, 38 bp, Artificial Sequence
  primer
gtaaaacgacggccagtcgatcctcttcctatctgccc

SEQ ID NO: 117310 - DNA, 21 bp, Artificial Sequence
  primer
gaataattgcttccagctcca

SEQ ID NO: 117311 - DNA, 23 bp, Artificial Sequence
  primer
ttctgatttcatatcttccctgg

SEQ ID NO: 117312 - DNA, 38 bp, Artificial Sequence
  primer
gtaaaacgacggccagtcgatacccttgctgatgtgac

SEQ ID NO: 117313 - DNA, 21 bp, Artificial Sequence
  primer
acgtgaattgcaaatgagaga

SEQ ID NO: 117314 - DNA, 21 bp, Artificial Sequence
  primer
gctgcttctcaacggacatag

SEQ ID NO: 117315 - DNA, 38 bp, Artificial Sequence
  primer
gtaaaacgacggccagtaaaccagcatactccaaggtt

SEQ ID NO: 117316 - DNA, 35 bp, Artificial Sequence
  primer
gtaaaacgacggccagtaggtgcctgtcaccatgc

SEQ ID NO: 117317 - DNA, 27 bp, Artificial Sequence
  primer
tctttccattgtatatgaagaacagag

SEQ ID NO: 117318 - DNA, 20 bp, Artificial Sequence
  primer
tttcatcaatggtgacccac

SEQ ID NO: 117319 - DNA, 44 bp, Artificial Sequence
  primer
gtaaaacgacggccagtaaatgtatactgttggcttaaacactg

SEQ ID NO: 117320 - DNA, 22 bp, Artificial Sequence
  primer
gaaactttcattggtgtttccc

SEQ ID NO: 117321 - DNA, 36 bp, Artificial Sequence
  primer
gtaaaacgacggccagtcagagtctgcagtgagcgg

SEQ ID NO: 117322 - DNA, 41 bp, Artificial Sequence
  primer
gtaaaacgacggccagtcccatgacattctatggtaaattg

SEQ ID NO: 117323 - DNA, 25 bp, Artificial Sequence
  primer
ggggaagtaaataaccacttaaatc

SEQ ID NO: 117324 - DNA, 22 bp, Artificial Sequence
  primer
tttgaccaaagagattccatcc

SEQ ID NO: 117325 - DNA, 21 bp, Artificial Sequence
  primer
ttccaacaatcgaacaccttg

SEQ ID NO: 117326 - DNA, 38 bp, Artificial Sequence
  primer
gtaaaacgacggccagtcctctcaaagggttcatttgc

SEQ ID NO: 117327 - DNA, 39 bp, Artificial Sequence
  primer
gtaaaacgacggccagtggaaacgaagtgaaaggaaagg

SEQ ID NO: 117328 - DNA, 38 bp, Artificial Sequence
  primer
gtaaaacgacggccagtatcattcaatggctttagggc

SEQ ID NO: 117329 - DNA, 39 bp, Artificial Sequence
  primer
gtaaaacgacggccagtcagcagttgagacaaagagctg

SEQ ID NO: 117330 - DNA, 21 bp, Artificial Sequence
  primer
tgtactatctgggcaaggcac

SEQ ID NO: 117331 - DNA, 21 bp, Artificial Sequence
  primer
tgcgtttctagtccttatggc

SEQ ID NO: 117332 - DNA, 38 bp, Artificial Sequence
  primer
gtaaaacgacggccagtcatggtactggcctttgacag

SEQ ID NO: 117333 - DNA, 43 bp, Artificial Sequence
  primer
gtaaaacgacggccagttccaacttgtagagtctatggtctga

SEQ ID NO: 117334 - DNA, 22 bp, Artificial Sequence
  primer
gatccaacctttaggatcatgc

SEQ ID NO: 117335 - DNA, 23 bp, Artificial Sequence
  primer
tcttgtcaccaaacagtttcacc

SEQ ID NO: 117336 - DNA, 25 bp, Artificial Sequence
  primer
tgctttgtgtaagtaagcaagtcaa

SEQ ID NO: 117337 - DNA, 21 bp, Artificial Sequence
  primer
tcacatctgatggatgcttgg

SEQ ID NO: 117338 - DNA, 21 bp, Artificial Sequence
  primer
acattgtagagtgcaggcaaa

SEQ ID NO: 117339 - DNA, 20 bp, Artificial Sequence
  primer
aaatcaaagagcacgggaaa

SEQ ID NO: 117340 - DNA, 38 bp, Artificial Sequence
  primer
gtaaaacgacggccagttccagtgctggagtttgagat

SEQ ID NO: 117341 - DNA, 38 bp, Artificial Sequence
  primer
gtaaaacgacggccagtagctggagatcctcttccctc

SEQ ID NO: 117342 - DNA, 21 bp, Artificial Sequence
  primer
gtgggcactggtcaaactatg

SEQ ID NO: 117343 - DNA, 21 bp, Artificial Sequence
  primer
gttctccagctggcatctctc

SEQ ID NO: 117344 - DNA, 21 bp, Artificial Sequence
  primer
gtgtccagccaacaagacaac

SEQ ID NO: 117345 - DNA, 21 bp, Artificial Sequence
  primer
gtagccttcaagacgctctcc

SEQ ID NO: 117346 - DNA, 22 bp, Artificial Sequence
  primer
cccatttgtttctcaggcatag

SEQ ID NO: 117347 - DNA, 22 bp, Artificial Sequence
  primer
aaaccgcgtaacaatttgaaag

SEQ ID NO: 117348 - DNA, 21 bp, Artificial Sequence
  primer
ctttcacagcagatgagggag

SEQ ID NO: 117349 - DNA, 21 bp, Artificial Sequence
  primer
agtcgagcagtgattcttggg

SEQ ID NO: 117350 - DNA, 39 bp, Artificial Sequence
  primer
gtaaaacgacggccagtaagcaggagagtctttgcactg

SEQ ID NO: 117351 - DNA, 23 bp, Artificial Sequence
  primer
aagaagactttacccatgcatcc

SEQ ID NO: 117352 - DNA, 21 bp, Artificial Sequence
  primer
attggttctctgctgtgatgg

SEQ ID NO: 117353 - DNA, 38 bp, Artificial Sequence
  primer
gtaaaacgacggccagtgaacacataaacggagacccg

SEQ ID NO: 117354 - DNA, 21 bp, Artificial Sequence
  primer
tgtgctccctgaaatgctaac

SEQ ID NO: 117355 - DNA, 24 bp, Artificial Sequence
  primer
ttgggagttaatggaaagctacag

SEQ ID NO: 117356 - DNA, 37 bp, Artificial Sequence
  primer
gtaaaacgacggccagtatcagcactgcttcaccctg

SEQ ID NO: 117357 - DNA, 21 bp, Artificial Sequence
  primer
agcaacagttaatccgctctg

SEQ ID NO: 117358 - DNA, 21 bp, Artificial Sequence
  primer
ccgacttcaaatcattggtct

SEQ ID NO: 117359 - DNA, 21 bp, Artificial Sequence
  primer
tcatggttgggtttagagtcg

SEQ ID NO: 117360 - DNA, 38 bp, Artificial Sequence
  primer
gtaaaacgacggccagttgataggcttggtggaaacag

SEQ ID NO: 117361 - DNA, 21 bp, Artificial Sequence
  primer
cagctatatcacaccaacggg

SEQ ID NO: 117362 - DNA, 21 bp, Artificial Sequence
  primer
acttatctgcacccgcttctg

SEQ ID NO: 117363 - DNA, 38 bp, Artificial Sequence
  primer
gtaaaacgacggccagtcatggcaagttgaggacacag

SEQ ID NO: 117364 - DNA, 21 bp, Artificial Sequence
  primer
atgtgcttccagcaaggagac

SEQ ID NO: 117365 - DNA, 38 bp, Artificial Sequence
  primer
gtaaaacgacggccagtctgcatttaagcatctgagcc

SEQ ID NO: 117366 - DNA, 23 bp, Artificial Sequence
  primer
ttggtgtcataacactgaacagg

SEQ ID NO: 117367 - DNA, 37 bp, Artificial Sequence
  primer
gtaaaacgacggccagtaggtcactgcaaagtcgtgg

SEQ ID NO: 117368 - DNA, 39 bp, Artificial Sequence
  primer
gtaaaacgacggccagtcccttgttaggaactaggaggg

SEQ ID NO: 117369 - DNA, 21 bp, Artificial Sequence
  primer
gatgaactgcagggtaaaggc

SEQ ID NO: 117370 - DNA, 38 bp, Artificial Sequence
  primer
gtaaaacgacggccagttgggaaacaaaggaacgaaac

SEQ ID NO: 117371 - DNA, 38 bp, Artificial Sequence
  primer
gtaaaacgacggccagtgccacaaccctgtttcttgag

SEQ ID NO: 117372 - DNA, 22 bp, Artificial Sequence
  primer
ccctttcagtgctaaagctgag

SEQ ID NO: 117373 - DNA, 22 bp, Artificial Sequence
  primer
ttctgaggttgtgaatgctttg

SEQ ID NO: 117374 - DNA, 42 bp, Artificial Sequence
  primer
gtaaaacgacggccagttggtttctttcttaggtaatggagg

SEQ ID NO: 117375 - DNA, 21 bp, Artificial Sequence
  primer
agctgtccctctcattatgcc

SEQ ID NO: 117376 - DNA, 21 bp, Artificial Sequence
  primer
gtgggcactggtcaaactatg

SEQ ID NO: 117377 - DNA, 21 bp, Artificial Sequence
  primer
gagggacctgggttaaagagg

SEQ ID NO: 117378 - DNA, 21 bp, Artificial Sequence
  primer
gtgtccagccaacaagacaac

SEQ ID NO: 117379 - DNA, 35 bp, Artificial Sequence
  primer
gtaaaacgacggccagtggctgactctcactcggc

SEQ ID NO: 117380 - DNA, 37 bp, Artificial Sequence
  primer
gtaaaacgacggccagtgaacgacttcttgcaagccc

SEQ ID NO: 117381 - DNA, 38 bp, Artificial Sequence
  primer
gtaaaacgacggccagttgagctcaacaaccagctcag

SEQ ID NO: 117382 - DNA, 21 bp, Artificial Sequence
  primer
ggtcttccttggtggtttcag

SEQ ID NO: 117383 - DNA, 37 bp, Artificial Sequence
  primer
gtaaaacgacggccagtgcctggtcagagacaggtcc

SEQ ID NO: 117384 - DNA, 19 bp, Artificial Sequence
  primer
attgctcccacctcagcag

SEQ ID NO: 117385 - DNA, 40 bp, Artificial Sequence
  primer
gtaaaacgacggccagtgcacaagaataatggtaaccaca

SEQ ID NO: 117386 - DNA, 40 bp, Artificial Sequence
  primer
gtaaaacgacggccagtcctattgttgtctgagtcccagc

SEQ ID NO: 117387 - DNA, 38 bp, Artificial Sequence
  primer
gtaaaacgacggccagtccgtgattggaactggaaatc

SEQ ID NO: 117388 - DNA, 20 bp, Artificial Sequence
  primer
tcaaatcccacagagcatcc

SEQ ID NO: 117389 - DNA, 21 bp, Artificial Sequence
  primer
ccttcatagatgaaacgacgg

SEQ ID NO: 117390 - DNA, 38 bp, Artificial Sequence
  primer
gtaaaacgacggccagtcctggatgcagatgtgatagc

SEQ ID NO: 117391 - DNA, 21 bp, Artificial Sequence
  primer
tctttgaggtggagttagcgg

SEQ ID NO: 117392 - DNA, 38 bp, Artificial Sequence
  primer
gtaaaacgacggccagtgtgggtgcttgtgtgtctagc

SEQ ID NO: 117393 - DNA, 37 bp, Artificial Sequence
  primer
gtaaaacgacggccagttgaacaggatcgctgtaggc

SEQ ID NO: 117394 - DNA, 21 bp, Artificial Sequence
  primer
gattattgtgctggagggacc

SEQ ID NO: 117395 - DNA, 37 bp, Artificial Sequence
  primer
gtaaaacgacggccagtgacccacaaaccctctctgg

SEQ ID NO: 117396 - DNA, 21 bp, Artificial Sequence
  primer
gggaggatgctcagctctaac

SEQ ID NO: 117397 - DNA, 21 bp, Artificial Sequence
  primer
gacagtaccctgctctcaccc

SEQ ID NO: 117398 - DNA, 38 bp, Artificial Sequence
  primer
gtaaaacgacggccagtggcagaagctcagatacaggc

SEQ ID NO: 117399 - DNA, 21 bp, Artificial Sequence
  primer
acagctgggtggcagataaag

SEQ ID NO: 117400 - DNA, 20 bp, Artificial Sequence
  primer
ccagactcttctccacaccg

SEQ ID NO: 117401 - DNA, 21 bp, Artificial Sequence
  primer
ctcgcatgatggaatccctac

SEQ ID NO: 117402 - DNA, 38 bp, Artificial Sequence
  primer
gtaaaacgacggccagttttggagacaaatggcagaag

SEQ ID NO: 117403 - DNA, 21 bp, Artificial Sequence
  primer
gaggctcctcccttcagtctc

SEQ ID NO: 117404 - DNA, 38 bp, Artificial Sequence
  primer
gtaaaacgacggccagttatgtatctgccactctgccc

SEQ ID NO: 117405 - DNA, 20 bp, Artificial Sequence
  primer
atccagatggtgctgtgagc

SEQ ID NO: 117406 - DNA, 21 bp, Artificial Sequence
  primer
gagaaagactggaggtggtgg

SEQ ID NO: 117407 - DNA, 38 bp, Artificial Sequence
  primer
gtaaaacgacggccagtgtgtttgacttccatgggttg

SEQ ID NO: 117408 - DNA, 38 bp, Artificial Sequence
  primer
gtaaaacgacggccagtcacctctgtgtcatgctatgc

SEQ ID NO: 117409 - DNA, 21 bp, Artificial Sequence
  primer
tgaaactgacttgtgccttgg

SEQ ID NO: 117410 - DNA, 18 bp, Artificial Sequence
  primer
gcatgatcctggtgctgg

SEQ ID NO: 117411 - DNA, 38 bp, Artificial Sequence
  primer
gtaaaacgacggccagtacaccagggtgtaggatttgg

SEQ ID NO: 117412 - DNA, 21 bp, Artificial Sequence
  primer
gtcaaattctttgtgccctgg

SEQ ID NO: 117413 - DNA, 35 bp, Artificial Sequence
  primer
gtaaaacgacggccagtgtgctaggggaccgggac

SEQ ID NO: 117414 - DNA, 38 bp, Artificial Sequence
  primer
gtaaaacgacggccagtgtctcagagtttccggtcagc

SEQ ID NO: 117415 - DNA, 38 bp, Artificial Sequence
  primer
gtaaaacgacggccagtgggtagtggtggtactgctcc

SEQ ID NO: 117416 - DNA, 21 bp, Artificial Sequence
  primer
atgaactgggatttctgccac

SEQ ID NO: 117417 - DNA, 25 bp, Artificial Sequence
  primer
ttgtttgttctctaaatgtttccaa

SEQ ID NO: 117418 - DNA, 38 bp, Artificial Sequence
  primer
gtaaaacgacggccagtatgcagccatgcactcactac

SEQ ID NO: 117419 - DNA, 38 bp, Artificial Sequence
  primer
gtaaaacgacggccagtctggaaatcatgatgtgggtc

SEQ ID NO: 117420 - DNA, 21 bp, Artificial Sequence
  primer
tgtgaacccaggatctcaagg

SEQ ID NO: 117421 - DNA, 37 bp, Artificial Sequence
  primer
gtaaaacgacggccagtcaaacaaccaaacacccagg

SEQ ID NO: 117422 - DNA, 38 bp, Artificial Sequence
  primer
gtaaaacgacggccagtaccagtcaagctctgtttccc

SEQ ID NO: 117423 - DNA, 40 bp, Artificial Sequence
  primer
gtaaaacgacggccagttggttcactctacacacctctgc

SEQ ID NO: 117424 - DNA, 38 bp, Artificial Sequence
  primer
gtaaaacgacggccagttcatactgccacaatgcacac

SEQ ID NO: 117425 - DNA, 21 bp, Artificial Sequence
  primer
tctcacctatgctgttcgcag

SEQ ID NO: 117426 - DNA, 35 bp, Artificial Sequence
  primer
gtaaaacgacggccagtaaacgccagcagatccac

SEQ ID NO: 117427 - DNA, 21 bp, Artificial Sequence
  primer
tgcaacaggaacaggagagag

SEQ ID NO: 117428 - DNA, 21 bp, Artificial Sequence
  primer
ttcctggctccactattgacc

SEQ ID NO: 117429 - DNA, 38 bp, Artificial Sequence
  primer
gtaaaacgacggccagtatgctgaggaccaactgtgtt

SEQ ID NO: 117430 - DNA, 40 bp, Artificial Sequence
  primer
gtaaaacgacggccagtgctcctcaaataactgtgtctgg

SEQ ID NO: 117431 - DNA, 38 bp, Artificial Sequence
  primer
gtaaaacgacggccagttgccagactagaaagcttcgc

SEQ ID NO: 117432 - DNA, 27 bp, Artificial Sequence
  primer
tcaaatacaacaatactcccacctagt

SEQ ID NO: 117433 - DNA, 36 bp, Artificial Sequence
  primer
gtaaaacgacggccagtgcagagcgatggagacagc

SEQ ID NO: 117434 - DNA, 38 bp, Artificial Sequence
  primer
gtaaaacgacggccagtgctactctcaaactcctgggc

SEQ ID NO: 117435 - DNA, 38 bp, Artificial Sequence
  primer
gtaaaacgacggccagtttcttgggcccgtctactaac

SEQ ID NO: 117436 - DNA, 38 bp, Artificial Sequence
  primer
gtaaaacgacggccagtcagcacccgtgaaacagtaag

SEQ ID NO: 117437 - DNA, 21 bp, Artificial Sequence
  primer
atttccaaatgaagaccaccc

SEQ ID NO: 117438 - DNA, 38 bp, Artificial Sequence
  primer
gtaaaacgacggccagtcttaaccatggaacgtgaggg

SEQ ID NO: 117439 - DNA, 20 bp, Artificial Sequence
  primer
ggcaggttctgagctctgtg

SEQ ID NO: 117440 - DNA, 39 bp, Artificial Sequence
  primer
gtaaaacgacggccagtaagtatatgccgctggctgtag

SEQ ID NO: 117441 - DNA, 38 bp, Artificial Sequence
  primer
gtaaaacgacggccagttgaatgcttcgtaattgctgg

SEQ ID NO: 117442 - DNA, 24 bp, Artificial Sequence
  primer
gagcctgtataagccagatttctc

SEQ ID NO: 117443 - DNA, 38 bp, Artificial Sequence
  primer
gtaaaacgacggccagtcaagacaaacccttccactgc

SEQ ID NO: 117444 - DNA, 21 bp, Artificial Sequence
  primer
gcaaacacgagatcccttcag

SEQ ID NO: 117445 - DNA, 23 bp, Artificial Sequence
  primer
ggaggaaatggatggagataaac

SEQ ID NO: 117446 - DNA, 20 bp, Artificial Sequence
  primer
tacagtggtgggatcttggc

SEQ ID NO: 117447 - DNA, 24 bp, Artificial Sequence
  primer
atataaatgcctctctggaggaac

SEQ ID NO: 117448 - DNA, 21 bp, Artificial Sequence
  primer
ggaacactcagcaaacacgag

SEQ ID NO: 117449 - DNA, 37 bp, Artificial Sequence
  primer
gtaaaacgacggccagtacttcagagctgtgcgttgg

SEQ ID NO: 117450 - DNA, 37 bp, Artificial Sequence
  primer
gtaaaacgacggccagtcaggttccaactcccagacc

SEQ ID NO: 117451 - DNA, 41 bp, Artificial Sequence
  primer
gtaaaacgacggccagttgttgacaatctatgtggttgaag

SEQ ID NO: 117452 - DNA, 20 bp, Artificial Sequence
  primer
gatgcgtagtgtcctggctc

SEQ ID NO: 117453 - DNA, 22 bp, Artificial Sequence
  primer
tccctaggtgatgggttgatag

SEQ ID NO: 117454 - DNA, 21 bp, Artificial Sequence
  primer
ttggaaatgcctagcacacag

SEQ ID NO: 117455 - DNA, 21 bp, Artificial Sequence
  primer
ttagaattccctgttggcagc

SEQ ID NO: 117456 - DNA, 21 bp, Artificial Sequence
  primer
ttggaaatgcctagcacacag

SEQ ID NO: 117457 - DNA, 21 bp, Artificial Sequence
  primer
ttagaattccctgttggcagc

SEQ ID NO: 117458 - DNA, 40 bp, Artificial Sequence
  primer
gtaaaacgacggccagtcctgtgtctgaatctgaatcacc

SEQ ID NO: 117459 - DNA, 38 bp, Artificial Sequence
  primer
gtaaaacgacggccagtagacatcaagaacccacctgc

SEQ ID NO: 117460 - DNA, 22 bp, Artificial Sequence
  primer
cccagcatgacttagcaatgac

SEQ ID NO: 117461 - DNA, 26 bp, Artificial Sequence
  primer
tcagaaatagaggatgtttaattggg

SEQ ID NO: 117462 - DNA, 40 bp, Artificial Sequence
  primer
gtaaaacgacggccagtttctgtatcgtagcttctcggtg

SEQ ID NO: 117463 - DNA, 23 bp, Artificial Sequence
  primer
gggatgctcgtgaattaagaaac

SEQ ID NO: 117464 - DNA, 38 bp, Artificial Sequence
  primer
gtaaaacgacggccagtagtttggagctgcttccgtag

SEQ ID NO: 117465 - DNA, 41 bp, Artificial Sequence
  primer
gtaaaacgacggccagttctttgtctcttcagtatccttgc

SEQ ID NO: 117466 - DNA, 22 bp, Artificial Sequence
  primer
tgtgcctctgtaagcagaattg

SEQ ID NO: 117467 - DNA, 41 bp, Artificial Sequence
  primer
gtaaaacgacggccagtttctttcactaagccaagtttgtg

SEQ ID NO: 117468 - DNA, 43 bp, Artificial Sequence
  primer
gtaaaacgacggccagtacagtttaacatcttacatcttgcat

SEQ ID NO: 117469 - DNA, 40 bp, Artificial Sequence
  primer
gtaaaacgacggccagttctataatgcccagtgtgacaac

SEQ ID NO: 117470 - DNA, 21 bp, Artificial Sequence
  primer
ccagtgccaaacacagaagtt

SEQ ID NO: 117471 - DNA, 36 bp, Artificial Sequence
  primer
gtaaaacgacggccagtggccatcttggttcatgtg

SEQ ID NO: 117472 - DNA, 27 bp, Artificial Sequence
  primer
ttctaagtactctttgatggttgagga

SEQ ID NO: 117473 - DNA, 36 bp, Artificial Sequence
  primer
gtaaaacgacggccagtggagactcctgccaaagcc

SEQ ID NO: 117474 - DNA, 21 bp, Artificial Sequence
  primer
aggatgcagtacaccaggtcc

SEQ ID NO: 117475 - DNA, 38 bp, Artificial Sequence
  primer
gtaaaacgacggccagtataacattcgacccatctcgc

SEQ ID NO: 117476 - DNA, 38 bp, Artificial Sequence
  primer
gtaaaacgacggccagtgccactaattccagttacgcc

SEQ ID NO: 117477 - DNA, 38 bp, Artificial Sequence
  primer
gtaaaacgacggccagtgtgattcgacttcgagctgtg

SEQ ID NO: 117478 - DNA, 38 bp, Artificial Sequence
  primer
gtaaaacgacggccagtgatgacctgagcacgaagttg

SEQ ID NO: 117479 - DNA, 38 bp, Artificial Sequence
  primer
gtaaaacgacggccagtggtcgcaacttactctcctgg

SEQ ID NO: 117480 - DNA, 38 bp, Artificial Sequence
  primer
gtaaaacgacggccagtacttgtttgaatgggaatggc

SEQ ID NO: 117481 - DNA, 21 bp, Artificial Sequence
  primer
atcttccggaatgggaaagag

SEQ ID NO: 117482 - DNA, 21 bp, Artificial Sequence
  primer
ctcttgcatccaaagcgtaac

SEQ ID NO: 117483 - DNA, 27 bp, Artificial Sequence
  primer
cctttaaacctataaggaaagcagttc

SEQ ID NO: 117484 - DNA, 21 bp, Artificial Sequence
  primer
ccatattggacagcacatccc

SEQ ID NO: 117485 - DNA, 20 bp, Artificial Sequence
  primer
tcaaccatcccttcaagctg

SEQ ID NO: 117486 - DNA, 21 bp, Artificial Sequence
  primer
atagggatggctcctttctca

SEQ ID NO: 117487 - DNA, 21 bp, Artificial Sequence
  primer
aatgctggatttgaaggaatg

SEQ ID NO: 117488 - DNA, 23 bp, Artificial Sequence
  primer
aaatcaatggtttctgatgttgg

SEQ ID NO: 117489 - DNA, 40 bp, Artificial Sequence
  primer
gtaaaacgacggccagtcaggacctcatttcataaactcc

SEQ ID NO: 117490 - DNA, 23 bp, Artificial Sequence
  primer
cagttgtttccctattcaccctc

SEQ ID NO: 117491 - DNA, 39 bp, Artificial Sequence
  primer
gtaaaacgacggccagtcaaaggcacatgagtgaaatcc

SEQ ID NO: 117492 - DNA, 28 bp, Artificial Sequence
  primer
ggcaatgattaccctaataatatcacat

SEQ ID NO: 117493 - DNA, 22 bp, Artificial Sequence
  primer
tcatacttgtttctgtggcagg

SEQ ID NO: 117494 - DNA, 21 bp, Artificial Sequence
  primer
agctggagcatacaccctctc

SEQ ID NO: 117495 - DNA, 38 bp, Artificial Sequence
  primer
gtaaaacgacggccagtagacaccgtggtgttcctagc

SEQ ID NO: 117496 - DNA, 39 bp, Artificial Sequence
  primer
gtaaaacgacggccagttgtggtcctttgcatatcagtg

SEQ ID NO: 117497 - DNA, 21 bp, Artificial Sequence
  primer
tgttgatttccactgcactcc

SEQ ID NO: 117498 - DNA, 21 bp, Artificial Sequence
  primer
ggtttgaccagctgatttgtt

SEQ ID NO: 117499 - DNA, 24 bp, Artificial Sequence
  primer
ggataccagttcacttgttctgtg

SEQ ID NO: 117500 - DNA, 21 bp, Artificial Sequence
  primer
tatttgctggtggactgatgc

SEQ ID NO: 117501 - DNA, 21 bp, Artificial Sequence
  primer
ctttgtgactgccaaatgctc

SEQ ID NO: 117502 - DNA, 24 bp, Artificial Sequence
  primer
tgcaaacaatttccctagattagc

SEQ ID NO: 117503 - DNA, 21 bp, Artificial Sequence
  primer
aagccaacaaacaggcaagtc

SEQ ID NO: 117504 - DNA, 20 bp, Artificial Sequence
  primer
aggtaaagcggctctatggg

SEQ ID NO: 117505 - DNA, 43 bp, Artificial Sequence
  primer
gtaaaacgacggccagtaatgtcatatctctattcttggcaca

SEQ ID NO: 117506 - DNA, 38 bp, Artificial Sequence
  primer
gtaaaacgacggccagtggattcagctgcctcaaactt

SEQ ID NO: 117507 - DNA, 44 bp, Artificial Sequence
  primer
gtaaaacgacggccagtcctgctcttaaatgatcttccttattc

SEQ ID NO: 117508 - DNA, 19 bp, Artificial Sequence
  primer
cagatgagcagggcagcat

SEQ ID NO: 117509 - DNA, 39 bp, Artificial Sequence
  primer
gtaaaacgacggccagtgcactgactctgaaactgaagg

SEQ ID NO: 117510 - DNA, 23 bp, Artificial Sequence
  primer
ttctccatttcagtggtaacagc

SEQ ID NO: 117511 - DNA, 20 bp, Artificial Sequence
  primer
tttgatcagtgacccgattt

SEQ ID NO: 117512 - DNA, 21 bp, Artificial Sequence
  primer
cagaagccgagtaagtctccg

SEQ ID NO: 117513 - DNA, 21 bp, Artificial Sequence
  primer
gcccaatacagtgagctttgc

SEQ ID NO: 117514 - DNA, 38 bp, Artificial Sequence
  primer
gtaaaacgacggccagtagaaagcccgacagttgacag

SEQ ID NO: 117515 - DNA, 21 bp, Artificial Sequence
  primer
taagctgttgcaaacacatgc

SEQ ID NO: 117516 - DNA, 21 bp, Artificial Sequence
  primer
agtgaagcctgcaaatcttgg

SEQ ID NO: 117517 - DNA, 21 bp, Artificial Sequence
  primer
tctatttgggttcagtctgcc

SEQ ID NO: 117518 - DNA, 43 bp, Artificial Sequence
  primer
gtaaaacgacggccagttgtcctttacatttcctgtatgtcag

SEQ ID NO: 117519 - DNA, 23 bp, Artificial Sequence
  primer
ccaggttgtacatactgtgttgc

SEQ ID NO: 117520 - DNA, 39 bp, Artificial Sequence
  primer
gtaaaacgacggccagtgagccagcatgattgattattg

SEQ ID NO: 117521 - DNA, 26 bp, Artificial Sequence
  primer
gacatagcagttacttaggacccttg

SEQ ID NO: 117522 - DNA, 41 bp, Artificial Sequence
  primer
gtaaaacgacggccagtcaacatatattagcgcatgctaca

SEQ ID NO: 117523 - DNA, 38 bp, Artificial Sequence
  primer
gtaaaacgacggccagtagggctttccataagtcttgc

SEQ ID NO: 117524 - DNA, 23 bp, Artificial Sequence
  primer
aatatggcaagaactgtggaaac

SEQ ID NO: 117525 - DNA, 38 bp, Artificial Sequence
  primer
gtaaaacgacggccagtgctccatgaacctaaccatcc

SEQ ID NO: 117526 - DNA, 38 bp, Artificial Sequence
  primer
gtaaaacgacggccagtgatcctgggtatttgaggctg

SEQ ID NO: 117527 - DNA, 38 bp, Artificial Sequence
  primer
gtaaaacgacggccagttcaaacaggtcacattccctc

SEQ ID NO: 117528 - DNA, 38 bp, Artificial Sequence
  primer
gtaaaacgacggccagtacagcatatttccgaagaggc

SEQ ID NO: 117529 - DNA, 21 bp, Artificial Sequence
  primer
taattaggtccgagcaaaggg

SEQ ID NO: 117530 - DNA, 21 bp, Artificial Sequence
  primer
catcacttgaatttctggccc

SEQ ID NO: 117531 - DNA, 38 bp, Artificial Sequence
  primer
gtaaaacgacggccagttgcctagccatattcaccctc

SEQ ID NO: 117532 - DNA, 20 bp, Artificial Sequence
  primer
cacacagctcgctcagagac

SEQ ID NO: 117533 - DNA, 36 bp, Artificial Sequence
  primer
gtaaaacgacggccagttttgccagagatgagggtg

SEQ ID NO: 117534 - DNA, 20 bp, Artificial Sequence
  primer
tcagactccacctccagtgc

SEQ ID NO: 117535 - DNA, 38 bp, Artificial Sequence
  primer
gtaaaacgacggccagtctcctcgtgagatgatgcttg

SEQ ID NO: 117536 - DNA, 19 bp, Artificial Sequence
  primer
ggacccgagtctcccagtc

SEQ ID NO: 117537 - DNA, 20 bp, Artificial Sequence
  primer
ggccagcagaagctaaccag

SEQ ID NO: 117538 - DNA, 23 bp, Artificial Sequence
  primer
tgggtcatggaattgagtgtaac

SEQ ID NO: 117539 - DNA, 38 bp, Artificial Sequence
  primer
gtaaaacgacggccagtcacacaaacacatgggctgac

SEQ ID NO: 117540 - DNA, 38 bp, Artificial Sequence
  primer
gtaaaacgacggccagtgggctactgattccacttccc

SEQ ID NO: 117541 - DNA, 21 bp, Artificial Sequence
  primer
gcagcaacaacattagcatcg

SEQ ID NO: 117542 - DNA, 38 bp, Artificial Sequence
  primer
gtaaaacgacggccagtagaaggctgaattgcaagtgg

SEQ ID NO: 117543 - DNA, 21 bp, Artificial Sequence
  primer
tgattgtctggtcctttcctg

SEQ ID NO: 117544 - DNA, 22 bp, Artificial Sequence
  primer
gcagcgggaaactatttgtagg

SEQ ID NO: 117545 - DNA, 38 bp, Artificial Sequence
  primer
gtaaaacgacggccagttaatcagagccaactgcatcc

SEQ ID NO: 117546 - DNA, 23 bp, Artificial Sequence
  primer
tttgttccatagctgctgatttc

SEQ ID NO: 117547 - DNA, 38 bp, Artificial Sequence
  primer
gtaaaacgacggccagttaaacacctgccctcttcctc

SEQ ID NO: 117548 - DNA, 21 bp, Artificial Sequence
  primer
tctaaggagggctgagctgac

SEQ ID NO: 117549 - DNA, 25 bp, Artificial Sequence
  primer
ccttcttcctttgaatttcagaatc

SEQ ID NO: 117550 - DNA, 23 bp, Artificial Sequence
  primer
tgcctacaaacatttaaaccagg

SEQ ID NO: 117551 - DNA, 40 bp, Artificial Sequence
  primer
gtaaaacgacggccagtgcatctaaagcaaatgaagaccc

SEQ ID NO: 117552 - DNA, 21 bp, Artificial Sequence
  primer
gccactgaaacccaataatcc

SEQ ID NO: 117553 - DNA, 37 bp, Artificial Sequence
  primer
gtaaaacgacggccagtaagctgcatacaggcagtcc

SEQ ID NO: 117554 - DNA, 40 bp, Artificial Sequence
  primer
gtaaaacgacggccagtcatcatttcaaacctaggcactg

SEQ ID NO: 117555 - DNA, 40 bp, Artificial Sequence
  primer
gtaaaacgacggccagtcagaccgtaattgctatcctcag

SEQ ID NO: 117556 - DNA, 21 bp, Artificial Sequence
  primer
atggtaaggaagacaggcagg

SEQ ID NO: 117557 - DNA, 38 bp, Artificial Sequence
  primer
gtaaaacgacggccagtattggagcatggaagtaaccc

SEQ ID NO: 117558 - DNA, 21 bp, Artificial Sequence
  primer
cctgcagtagaaccctcaacc

SEQ ID NO: 117559 - DNA, 21 bp, Artificial Sequence
  primer
gatgctgtcattgagcctgac

SEQ ID NO: 117560 - DNA, 38 bp, Artificial Sequence
  primer
gtaaaacgacggccagtgcattatctcagagccacagg

SEQ ID NO: 117561 - DNA, 21 bp, Artificial Sequence
  primer
tgtctatctgagcccggtagc

SEQ ID NO: 117562 - DNA, 21 bp, Artificial Sequence
  primer
tctgagacacctcagagccag

SEQ ID NO: 117563 - DNA, 21 bp, Artificial Sequence
  primer
tgtttattgtctccgtcgcac

SEQ ID NO: 117564 - DNA, 38 bp, Artificial Sequence
  primer
gtaaaacgacggccagtttcttaacaatggatgcctgc

SEQ ID NO: 117565 - DNA, 21 bp, Artificial Sequence
  primer
tcgtactccagcctcaggttc

SEQ ID NO: 117566 - DNA, 41 bp, Artificial Sequence
  primer
gtaaaacgacggccagttttgtgaatacctctaaagcctgc

SEQ ID NO: 117567 - DNA, 38 bp, Artificial Sequence
  primer
gtaaaacgacggccagtttaaagaacagcagggcacac

SEQ ID NO: 117568 - DNA, 21 bp, Artificial Sequence
  primer
ggaatggctggatttcagaag

SEQ ID NO: 117569 - DNA, 21 bp, Artificial Sequence
  primer
gctgcatatatctgctgacgg

SEQ ID NO: 117570 - DNA, 38 bp, Artificial Sequence
  primer
gtaaaacgacggccagtctgaaagcaagagcagaccag

SEQ ID NO: 117571 - DNA, 39 bp, Artificial Sequence
  primer
gtaaaacgacggccagtccctggaggaagtccttaattc

SEQ ID NO: 117572 - DNA, 21 bp, Artificial Sequence
  primer
actggtaaacgatggctctcc

SEQ ID NO: 117573 - DNA, 21 bp, Artificial Sequence
  primer
ccgtgatggttatttcttccc

SEQ ID NO: 117574 - DNA, 21 bp, Artificial Sequence
  primer
ttctgtgtcaaagatggctgc

SEQ ID NO: 117575 - DNA, 21 bp, Artificial Sequence
  primer
acaccctcgaagcctatgaag

SEQ ID NO: 117576 - DNA, 21 bp, Artificial Sequence
  primer
atagctgctggtgtcttgcag

SEQ ID NO: 117577 - DNA, 38 bp, Artificial Sequence
  primer
gtaaaacgacggccagtagacatgttgtaagggctggg

SEQ ID NO: 117578 - DNA, 39 bp, Artificial Sequence
  primer
gtaaaacgacggccagttcaaggtatagcaaccactccc

SEQ ID NO: 117579 - DNA, 36 bp, Artificial Sequence
  primer
gtaaaacgacggccagtctctactgcaagcaccggg

SEQ ID NO: 117580 - DNA, 24 bp, Artificial Sequence
  primer
aagactgttccggtattaacctcc

SEQ ID NO: 117581 - DNA, 39 bp, Artificial Sequence
  primer
gtaaaacgacggccagtccctgtagagttgaagctgtgc

SEQ ID NO: 117582 - DNA, 21 bp, Artificial Sequence
  primer
aggctttggcattcaagtttc

SEQ ID NO: 117583 - DNA, 38 bp, Artificial Sequence
  primer
gtaaaacgacggccagtgggtgacagagtgagacccta

SEQ ID NO: 117584 - DNA, 41 bp, Artificial Sequence
  primer
gtaaaacgacggccagtcagtgtgtcaacatgccattacag

SEQ ID NO: 117585 - DNA, 26 bp, Artificial Sequence
  primer
tctcagaacacaatctcaaagtatca

SEQ ID NO: 117586 - DNA, 24 bp, Artificial Sequence
  primer
cacataaagcccttagtgcaaatc

SEQ ID NO: 117587 - DNA, 39 bp, Artificial Sequence
  primer
gtaaaacgacggccagttccactggcatttaactcatcc

SEQ ID NO: 117588 - DNA, 21 bp, Artificial Sequence
  primer
cattccagccctcaatattcc

SEQ ID NO: 117589 - DNA, 38 bp, Artificial Sequence
  primer
gtaaaacgacggccagtcctggtgttacctcagcttcc

SEQ ID NO: 117590 - DNA, 22 bp, Artificial Sequence
  primer
gcgtttgctttctctatggttg

SEQ ID NO: 117591 - DNA, 21 bp, Artificial Sequence
  primer
gtcactgccattgccattatc

SEQ ID NO: 117592 - DNA, 38 bp, Artificial Sequence
  primer
gtaaaacgacggccagtcctttgccactgtctgatttg

SEQ ID NO: 117593 - DNA, 21 bp, Artificial Sequence
  primer
tgttgctgtcactgctgtctg

SEQ ID NO: 117594 - DNA, 38 bp, Artificial Sequence
  primer
gtaaaacgacggccagtctgctgtcactatcgctgctg

SEQ ID NO: 117595 - DNA, 38 bp, Artificial Sequence
  primer
gtaaaacgacggccagttcattgctgtcagatgtgctg

SEQ ID NO: 117596 - DNA, 22 bp, Artificial Sequence
  primer
ccaactgtttgatttgattccc

SEQ ID NO: 117597 - DNA, 38 bp, Artificial Sequence
  primer
gtaaaacgacggccagttcaaagagctcaccattcctg

SEQ ID NO: 117598 - DNA, 25 bp, Artificial Sequence
  primer
tggagagtattacgaagaatcaacc

SEQ ID NO: 117599 - DNA, 25 bp, Artificial Sequence
  primer
actctacattcctatttcaaatgcc

SEQ ID NO: 117600 - DNA, 39 bp, Artificial Sequence
  primer
gtaaaacgacggccagtaagtttgcaatgaatttggctc

SEQ ID NO: 117601 - DNA, 21 bp, Artificial Sequence
  primer
tgcatctcatcaacccaattc

SEQ ID NO: 117602 - DNA, 39 bp, Artificial Sequence
  primer
gtaaaacgacggccagtcggtccagttgtaccttcagac

SEQ ID NO: 117603 - DNA, 42 bp, Artificial Sequence
  primer
gtaaaacgacggccagtaatctgaaggaattctgactcacac

SEQ ID NO: 117604 - DNA, 21 bp, Artificial Sequence
  primer
tgtatcaaggtgccgttcttg

SEQ ID NO: 117605 - DNA, 43 bp, Artificial Sequence
  primer
gtaaaacgacggccagttttgatcaagttctctcattaattcc

SEQ ID NO: 117606 - DNA, 38 bp, Artificial Sequence
  primer
gtaaaacgacggccagtgccagagaactgaaggcaatc

SEQ ID NO: 117607 - DNA, 22 bp, Artificial Sequence
  primer
cacacacacacaaacacacaca

SEQ ID NO: 117608 - DNA, 42 bp, Artificial Sequence
  primer
gtaaaacgacggccagtaaacacttctgttgtatttgttgcc

SEQ ID NO: 117609 - DNA, 38 bp, Artificial Sequence
  primer
gtaaaacgacggccagttttatgaggcgggaaatcttg

SEQ ID NO: 117610 - DNA, 40 bp, Artificial Sequence
  primer
gtaaaacgacggccagtgggccttgacaaagtattgattg

SEQ ID NO: 117611 - DNA, 39 bp, Artificial Sequence
  primer
gtaaaacgacggccagtgaatattagcatggatttgccg

SEQ ID NO: 117612 - DNA, 24 bp, Artificial Sequence
  primer
tgtgtctacatatcataggctggg

SEQ ID NO: 117613 - DNA, 21 bp, Artificial Sequence
  primer
atcacaatgaaggtgagcgtg

SEQ ID NO: 117614 - DNA, 20 bp, Artificial Sequence
  primer
cacgcccagccaataatgta

SEQ ID NO: 117615 - DNA, 38 bp, Artificial Sequence
  primer
gtaaaacgacggccagtctgctgccaacatgaattgac

SEQ ID NO: 117616 - DNA, 23 bp, Artificial Sequence
  primer
tcatgtatgtaggtttgggttgc

SEQ ID NO: 117617 - DNA, 21 bp, Artificial Sequence
  primer
atgtattctggtggctgggag

SEQ ID NO: 117618 - DNA, 24 bp, Artificial Sequence
  primer
aaaggttctggaaataaacagtgg

SEQ ID NO: 117619 - DNA, 37 bp, Artificial Sequence
  primer
gtaaaacgacggccagtgtacatctgctaccggccac

SEQ ID NO: 117620 - DNA, 38 bp, Artificial Sequence
  primer
gtaaaacgacggccagtgatcttccagtgttcgtctgg

SEQ ID NO: 117621 - DNA, 38 bp, Artificial Sequence
  primer
gtaaaacgacggccagtttcaagctggagggcattaag

SEQ ID NO: 117622 - DNA, 38 bp, Artificial Sequence
  primer
gtaaaacgacggccagtttctcagctacagcatgtgcc

SEQ ID NO: 117623 - DNA, 38 bp, Artificial Sequence
  primer
gtaaaacgacggccagtagtgcttcacatctttgctgg

SEQ ID NO: 117624 - DNA, 21 bp, Artificial Sequence
  primer
gggtcatctgctcctctatgg

SEQ ID NO: 117625 - DNA, 21 bp, Artificial Sequence
  primer
atgatttgcttccatgtgctg

SEQ ID NO: 117626 - DNA, 38 bp, Artificial Sequence
  primer
gtaaaacgacggccagtggctggaattggacttctttg

SEQ ID NO: 117627 - DNA, 21 bp, Artificial Sequence
  primer
caccagttccatttcacatgc

SEQ ID NO: 117628 - DNA, 38 bp, Artificial Sequence
  primer
gtaaaacgacggccagtatatcccacagctgccttctc

SEQ ID NO: 117629 - DNA, 38 bp, Artificial Sequence
  primer
gtaaaacgacggccagtggaaacagaaagcattgggac

SEQ ID NO: 117630 - DNA, 21 bp, Artificial Sequence
  primer
agtcagccaataccctgcaac

SEQ ID NO: 117631 - DNA, 21 bp, Artificial Sequence
  primer
ctgtggctctatcaaccctcc

SEQ ID NO: 117632 - DNA, 44 bp, Artificial Sequence
  primer
gtaaaacgacggccagttgtctgagggcatattatatttctgac

SEQ ID NO: 117633 - DNA, 38 bp, Artificial Sequence
  primer
gtaaaacgacggccagtacttagcaatttgcagccctc

SEQ ID NO: 117634 - DNA, 18 bp, Artificial Sequence
  primer
gtctggagacacccgcag

SEQ ID NO: 117635 - DNA, 35 bp, Artificial Sequence
  primer
gtaaaacgacggccagtctggaactggtcttcccg

SEQ ID NO: 117636 - DNA, 40 bp, Artificial Sequence
  primer
gtaaaacgacggccagtaagtaacacttctcccttgtgcc

SEQ ID NO: 117637 - DNA, 35 bp, Artificial Sequence
  primer
gtaaaacgacggccagtcctcagtgagaccctggc

SEQ ID NO: 117638 - DNA, 37 bp, Artificial Sequence
  primer
gtaaaacgacggccagtacaggtgtccacactctcgg

SEQ ID NO: 117639 - DNA, 42 bp, Artificial Sequence
  primer
gtaaaacgacggccagtttcaaacatttcatccttcattctt

SEQ ID NO: 117640 - DNA, 22 bp, Artificial Sequence
  primer
tggtgacaacagaaacatcagg

SEQ ID NO: 117641 - DNA, 21 bp, Artificial Sequence
  primer
ctggaacccaagcctcagtag

SEQ ID NO: 117642 - DNA, 38 bp, Artificial Sequence
  primer
gtaaaacgacggccagttgtccaactttggttgactgc

SEQ ID NO: 117643 - DNA, 38 bp, Artificial Sequence
  primer
gtaaaacgacggccagtagaagcaagctgcattcacag

SEQ ID NO: 117644 - DNA, 21 bp, Artificial Sequence
  primer
ttgggagcagacctggagtag

SEQ ID NO: 117645 - DNA, 21 bp, Artificial Sequence
  primer
gtaccaatccacaactgctcg

SEQ ID NO: 117646 - DNA, 21 bp, Artificial Sequence
  primer
cagggtttggaaaggctacac

SEQ ID NO: 117647 - DNA, 21 bp, Artificial Sequence
  primer
ctttaggaaagttccctgccc

SEQ ID NO: 117648 - DNA, 20 bp, Artificial Sequence
  primer
agccagacagaggaacaggg

SEQ ID NO: 117649 - DNA, 26 bp, Artificial Sequence
  primer
gactaactgaactcttgccaagtaag

SEQ ID NO: 117650 - DNA, 39 bp, Artificial Sequence
  primer
gtaaaacgacggccagtccatttgtgcctcataataccc

SEQ ID NO: 117651 - DNA, 26 bp, Artificial Sequence
  primer
gactttactgacataagcatccactg

SEQ ID NO: 117652 - DNA, 22 bp, Artificial Sequence
  primer
gaaagaggccagttggtgatac

SEQ ID NO: 117653 - DNA, 37 bp, Artificial Sequence
  primer
gtaaaacgacggccagtcagaggtcatttgccagagg

SEQ ID NO: 117654 - DNA, 40 bp, Artificial Sequence
  primer
gtaaaacgacggccagtaacaacagcctgggcttactaac

SEQ ID NO: 117655 - DNA, 21 bp, Artificial Sequence
  primer
tttgccctttaattctgccac

SEQ ID NO: 117656 - DNA, 21 bp, Artificial Sequence
  primer
aatcttggttgctgaccactg

SEQ ID NO: 117657 - DNA, 21 bp, Artificial Sequence
  primer
caatattctgcccttggcttg

SEQ ID NO: 117658 - DNA, 23 bp, Artificial Sequence
  primer
cgggaaagtgaataacaacacag

SEQ ID NO: 117659 - DNA, 21 bp, Artificial Sequence
  primer
gaccttgctccttgctgagac

SEQ ID NO: 117660 - DNA, 22 bp, Artificial Sequence
  primer
aaattcaccaccaagacaccac

SEQ ID NO: 117661 - DNA, 21 bp, Artificial Sequence
  primer
gccctgaaactttaaagcacg

SEQ ID NO: 117662 - DNA, 23 bp, Artificial Sequence
  primer
tcagcaattacgtgtgtgctatg

SEQ ID NO: 117663 - DNA, 41 bp, Artificial Sequence
  primer
gtaaaacgacggccagtcatgttgagggaaatcacatacag

SEQ ID NO: 117664 - DNA, 23 bp, Artificial Sequence
  primer
ccaataaatgacaattcgttccc

SEQ ID NO: 117665 - DNA, 21 bp, Artificial Sequence
  primer
ctttacttgtccagcctggtg

SEQ ID NO: 117666 - DNA, 21 bp, Artificial Sequence
  primer
ctgacaccagccatgaaagac

SEQ ID NO: 117667 - DNA, 21 bp, Artificial Sequence
  primer
accagtgagctatgatggtgc

SEQ ID NO: 117668 - DNA, 39 bp, Artificial Sequence
  primer
gtaaaacgacggccagtgccgaatttaaatgtagcaccc

SEQ ID NO: 117669 - DNA, 38 bp, Artificial Sequence
  primer
gtaaaacgacggccagttgcaagtcatgtcaaagaccc

SEQ ID NO: 117670 - DNA, 21 bp, Artificial Sequence
  primer
aaccctccacagactgagacg

SEQ ID NO: 117671 - DNA, 21 bp, Artificial Sequence
  primer
gtgacagaggctctctgggtg

SEQ ID NO: 117672 - DNA, 21 bp, Artificial Sequence
  primer
gccaaacatagctggtagctg

SEQ ID NO: 117673 - DNA, 38 bp, Artificial Sequence
  primer
gtaaaacgacggccagtcctcttcagagatgatgtgcg

SEQ ID NO: 117674 - DNA, 20 bp, Artificial Sequence
  primer
actcccattcttccctctgc

SEQ ID NO: 117675 - DNA, 43 bp, Artificial Sequence
  primer
gtaaaacgacggccagtaaatgacaagttcttccattacaaag

SEQ ID NO: 117676 - DNA, 38 bp, Artificial Sequence
  primer
gtaaaacgacggccagtgcaacttagcacggcagtatg

SEQ ID NO: 117677 - DNA, 22 bp, Artificial Sequence
  primer
aactcacctactgtgagccagc

SEQ ID NO: 117678 - DNA, 38 bp, Artificial Sequence
  primer
gtaaaacgacggccagtctagactggaagcaatctggc

SEQ ID NO: 117679 - DNA, 41 bp, Artificial Sequence
  primer
gtaaaacgacggccagtgacagaatgacagcaaatgtcaac

SEQ ID NO: 117680 - DNA, 37 bp, Artificial Sequence
  primer
gtaaaacgacggccagtactggcccaggtgctgttac

SEQ ID NO: 117681 - DNA, 39 bp, Artificial Sequence
  primer
gtaaaacgacggccagtggtcatgttaagtgatccctgg

SEQ ID NO: 117682 - DNA, 22 bp, Artificial Sequence
  primer
gctatatttgtgagtcggtggg

SEQ ID NO: 117683 - DNA, 19 bp, Artificial Sequence
  primer
cccgaggtacctgttctcc

SEQ ID NO: 117684 - DNA, 38 bp, Artificial Sequence
  primer
gtaaaacgacggccagttgggctagcctaggttcactg

SEQ ID NO: 117685 - DNA, 38 bp, Artificial Sequence
  primer
gtaaaacgacggccagttgaactcttcagtggtctgcg

SEQ ID NO: 117686 - DNA, 21 bp, Artificial Sequence
  primer
attctgacatcacagggaggc

SEQ ID NO: 117687 - DNA, 21 bp, Artificial Sequence
  primer
acctcagcaggaatcttgtcc

SEQ ID NO: 117688 - DNA, 21 bp, Artificial Sequence
  primer
tgatcgactgaccttgtcacc

SEQ ID NO: 117689 - DNA, 38 bp, Artificial Sequence
  primer
gtaaaacgacggccagtggacacagcctagaaacaggg

SEQ ID NO: 117690 - DNA, 35 bp, Artificial Sequence
  primer
gtaaaacgacggccagtacaggacggaccctggac

SEQ ID NO: 117691 - DNA, 42 bp, Artificial Sequence
  primer
gtaaaacgacggccagtgatgcactcaacaaatctaaggttc

SEQ ID NO: 117692 - DNA, 42 bp, Artificial Sequence
  primer
gtaaaacgacggccagttttccaatcactgcattaagataaa

SEQ ID NO: 117693 - DNA, 40 bp, Artificial Sequence
  primer
gtaaaacgacggccagtttcagggagtttcataatcaacg

SEQ ID NO: 117694 - DNA, 38 bp, Artificial Sequence
  primer
gtaaaacgacggccagtgaaattacaccaaaccctgcc

SEQ ID NO: 117695 - DNA, 41 bp, Artificial Sequence
  primer
gtaaaacgacggccagtcgggacttctaaagagtagcatgt

SEQ ID NO: 117696 - DNA, 40 bp, Artificial Sequence
  primer
gtaaaacgacggccagtcattagcaggaactctcacttgg

SEQ ID NO: 117697 - DNA, 36 bp, Artificial Sequence
  primer
gtaaaacgacggccagtaagagagaggtggcccgac

SEQ ID NO: 117698 - DNA, 21 bp, Artificial Sequence
  primer
tctcacgtctcacctttggag

SEQ ID NO: 117699 - DNA, 24 bp, Artificial Sequence
  primer
gtttaccgtcctcacactttattg

SEQ ID NO: 117700 - DNA, 22 bp, Artificial Sequence
  primer
gaagaattcatgacggaaccac

SEQ ID NO: 117701 - DNA, 35 bp, Artificial Sequence
  primer
gtaaaacgacggccagtctaatcgcagagctgccc

SEQ ID NO: 117702 - DNA, 40 bp, Artificial Sequence
  primer
gtaaaacgacggccagttttcagaaatgctaaagagctgg

SEQ ID NO: 117703 - DNA, 42 bp, Artificial Sequence
  primer
gtaaaacgacggccagttgaaagaaataagctgaaagaaacc

SEQ ID NO: 117704 - DNA, 43 bp, Artificial Sequence
  primer
gtaaaacgacggccagtaaatctatgtgtatcccttcacagaa

SEQ ID NO: 117705 - DNA, 23 bp, Artificial Sequence
  primer
tctggaatgctaaacacacacac

SEQ ID NO: 117706 - DNA, 41 bp, Artificial Sequence
  primer
gtaaaacgacggccagtgcaattctccttctttagcaagtc

SEQ ID NO: 117707 - DNA, 36 bp, Artificial Sequence
  primer
gtaaaacgacggccagtagggatttggcatcagcag

SEQ ID NO: 117708 - DNA, 20 bp, Artificial Sequence
  primer
acgactgcgacttagggatg

SEQ ID NO: 117709 - DNA, 19 bp, Artificial Sequence
  primer
ggttgaggttgttctgccc

SEQ ID NO: 117710 - DNA, 35 bp, Artificial Sequence
  primer
gtaaaacgacggccagtcctagtggccaaccaccc

SEQ ID NO: 117711 - DNA, 35 bp, Artificial Sequence
  primer
gtaaaacgacggccagtctcaccagcccatctcgg

SEQ ID NO: 117712 - DNA, 21 bp, Artificial Sequence
  primer
caggcaatggaggtgaggtag

SEQ ID NO: 117713 - DNA, 21 bp, Artificial Sequence
  primer
gctctgtatcacccagaaccc

SEQ ID NO: 117714 - DNA, 21 bp, Artificial Sequence
  primer
atggtctgggtatcagggaag

SEQ ID NO: 117715 - DNA, 37 bp, Artificial Sequence
  primer
gtaaaacgacggccagtagaccatgaacaggtggtgg

SEQ ID NO: 117716 - DNA, 38 bp, Artificial Sequence
  primer
gtaaaacgacggccagttggctgtggtcgttactgttc

SEQ ID NO: 117717 - DNA, 37 bp, Artificial Sequence
  primer
gtaaaacgacggccagtaacctgggctaccaggacac

SEQ ID NO: 117718 - DNA, 21 bp, Artificial Sequence
  primer
tgtaagtcacgtccatcaccc

SEQ ID NO: 117719 - DNA, 21 bp, Artificial Sequence
  primer
ggtttgttgtacggtgcaaag

SEQ ID NO: 117720 - DNA, 37 bp, Artificial Sequence
  primer
gtaaaacgacggccagtacatgccacatgcaaatgag

SEQ ID NO: 117721 - DNA, 21 bp, Artificial Sequence
  primer
gaggatccagagggtgacaag

SEQ ID NO: 117722 - DNA, 38 bp, Artificial Sequence
  primer
gtaaaacgacggccagtagaagagtcagaggcagcgag

SEQ ID NO: 117723 - DNA, 38 bp, Artificial Sequence
  primer
gtaaaacgacggccagtaccacagctccttaagtgcaa

SEQ ID NO: 117724 - DNA, 22 bp, Artificial Sequence
  primer
ttagaaaggtcttcaagctggc

SEQ ID NO: 117725 - DNA, 38 bp, Artificial Sequence
  primer
gtaaaacgacggccagtcacagccctaagagcttaccc

SEQ ID NO: 117726 - DNA, 22 bp, Artificial Sequence
  primer
tcacactctgactctcaggagc

SEQ ID NO: 117727 - DNA, 20 bp, Artificial Sequence
  primer
cacaccctcaacaaacctcc

SEQ ID NO: 117728 - DNA, 21 bp, Artificial Sequence
  primer
cttcaggttccttccaaaccc

SEQ ID NO: 117729 - DNA, 20 bp, Artificial Sequence
  primer
aggtagagcccatttggagg

SEQ ID NO: 117730 - DNA, 38 bp, Artificial Sequence
  primer
gtaaaacgacggccagttgtcttggcattctggatctc

SEQ ID NO: 117731 - DNA, 38 bp, Artificial Sequence
  primer
gtaaaacgacggccagtcgtactggatgacaatggtgc

SEQ ID NO: 117732 - DNA, 39 bp, Artificial Sequence
  primer
gtaaaacgacggccagtacagtggaagacagcaagactg

SEQ ID NO: 117733 - DNA, 21 bp, Artificial Sequence
  primer
tggctgaacagtttggaagtg

SEQ ID NO: 117734 - DNA, 21 bp, Artificial Sequence
  primer
cactgcattgaaacacttggc

SEQ ID NO: 117735 - DNA, 21 bp, Artificial Sequence
  primer
taggtcagctggaactgggtc

SEQ ID NO: 117736 - DNA, 38 bp, Artificial Sequence
  primer
gtaaaacgacggccagtttcatctctgtgtccagtgcc

SEQ ID NO: 117737 - DNA, 38 bp, Artificial Sequence
  primer
gtaaaacgacggccagtaaagactcacgagctgcttcc

SEQ ID NO: 117738 - DNA, 21 bp, Artificial Sequence
  primer
tcagaaaccttgctgcaaatg

SEQ ID NO: 117739 - DNA, 38 bp, Artificial Sequence
  primer
gtaaaacgacggccagtctccttgcccaaagacttcag

SEQ ID NO: 117740 - DNA, 38 bp, Artificial Sequence
  primer
gtaaaacgacggccagttcatgcttgcactttggtagc

SEQ ID NO: 117741 - DNA, 39 bp, Artificial Sequence
  primer
gtaaaacgacggccagtcgtagcatagtggcaagaaacc

SEQ ID NO: 117742 - DNA, 21 bp, Artificial Sequence
  primer
ttcatgctggaaacactgtcc

SEQ ID NO: 117743 - DNA, 41 bp, Artificial Sequence
  primer
gtaaaacgacggccagtttctgtctttgagattaccatccc

SEQ ID NO: 117744 - DNA, 18 bp, Artificial Sequence
  primer
gcgagcgacagagcagac

SEQ ID NO: 117745 - DNA, 38 bp, Artificial Sequence
  primer
gtaaaacgacggccagtcttagggtgcccaattctctg

SEQ ID NO: 117746 - DNA, 21 bp, Artificial Sequence
  primer
gatgaagtcaggaggcgtacc

SEQ ID NO: 117747 - DNA, 21 bp, Artificial Sequence
  primer
agacagatgctctgggactgg

SEQ ID NO: 117748 - DNA, 38 bp, Artificial Sequence
  primer
gtaaaacgacggccagttgctctaacccgtttctcctc

SEQ ID NO: 117749 - DNA, 21 bp, Artificial Sequence
  primer
ctctcctcaaacccagatccc

SEQ ID NO: 117750 - DNA, 37 bp, Artificial Sequence
  primer
gtaaaacgacggccagtagctctcaaggaccaaagcc

SEQ ID NO: 117751 - DNA, 37 bp, Artificial Sequence
  primer
gtaaaacgacggccagttcaatttgcccacagcctac

SEQ ID NO: 117752 - DNA, 21 bp, Artificial Sequence
  primer
tgtgtccatccagactccaag

SEQ ID NO: 117753 - DNA, 20 bp, Artificial Sequence
  primer
aaatggatcctgtccttggg

SEQ ID NO: 117754 - DNA, 21 bp, Artificial Sequence
  primer
gatggcctttgctggtacttg

SEQ ID NO: 117755 - DNA, 21 bp, Artificial Sequence
  primer
tctctccacctgcttctaccc

SEQ ID NO: 117756 - DNA, 18 bp, Artificial Sequence
  primer
aaccatagatggcgctgc

SEQ ID NO: 117757 - DNA, 18 bp, Artificial Sequence
  primer
gagcggtagcgtgatcgg

SEQ ID NO: 117758 - DNA, 35 bp, Artificial Sequence
  primer
gtaaaacgacggccagtcggttgtccacagatggg

SEQ ID NO: 117759 - DNA, 20 bp, Artificial Sequence
  primer
gtccagaaatggccggtatc

SEQ ID NO: 117760 - DNA, 20 bp, Artificial Sequence
  primer
gtacagagggctcctgaggg

SEQ ID NO: 117761 - DNA, 21 bp, Artificial Sequence
  primer
gaccactttcaccatgcactc

SEQ ID NO: 117762 - DNA, 21 bp, Artificial Sequence
  primer
tggtcagcatgtcagaagctc

SEQ ID NO: 117763 - DNA, 21 bp, Artificial Sequence
  primer
ttgtgctcaagtttcactgcc

SEQ ID NO: 117764 - DNA, 21 bp, Artificial Sequence
  primer
tgtctaaggccagaaagaggg

SEQ ID NO: 117765 - DNA, 21 bp, Artificial Sequence
  primer
gcacagagattgacgttcagc

SEQ ID NO: 117766 - DNA, 22 bp, Artificial Sequence
  primer
ttgcgtggtttgttgtcattag

SEQ ID NO: 117767 - DNA, 21 bp, Artificial Sequence
  primer
actccctgtaaggcaaggtcc

SEQ ID NO: 117768 - DNA, 38 bp, Artificial Sequence
  primer
gtaaaacgacggccagtaacaagaagccagactcctgc

SEQ ID NO: 117769 - DNA, 21 bp, Artificial Sequence
  primer
gaactctgggctttgacttcc

SEQ ID NO: 117770 - DNA, 21 bp, Artificial Sequence
  primer
cttctggacacagcaagggtc

SEQ ID NO: 117771 - DNA, 21 bp, Artificial Sequence
  primer
ttacatgggtaaggaggaggc

SEQ ID NO: 117772 - DNA, 19 bp, Artificial Sequence
  primer
ggccctaggcactttcacc

SEQ ID NO: 117773 - DNA, 21 bp, Artificial Sequence
  primer
cagggctgtgtctgcctagag

SEQ ID NO: 117774 - DNA, 21 bp, Artificial Sequence
  primer
ctattcaccctgcctgtaccc

SEQ ID NO: 117775 - DNA, 21 bp, Artificial Sequence
  primer
ccgcacagtcttcactcagac

SEQ ID NO: 117776 - DNA, 22 bp, Artificial Sequence
  primer
aaaggtaagtgccagcagagag

SEQ ID NO: 117777 - DNA, 21 bp, Artificial Sequence
  primer
tcaggctggtcactgtctgtc

SEQ ID NO: 117778 - DNA, 37 bp, Artificial Sequence
  primer
gtaaaacgacggccagtagtgagtgaacgtgggttgc

SEQ ID NO: 117779 - DNA, 21 bp, Artificial Sequence
  primer
tgaatgaatgtcccagctctc

SEQ ID NO: 117780 - DNA, 21 bp, Artificial Sequence
  primer
ctaccagctcctttgtccctg

SEQ ID NO: 117781 - DNA, 21 bp, Artificial Sequence
  primer
ggcattatctggaacaaccag

SEQ ID NO: 117782 - DNA, 38 bp, Artificial Sequence
  primer
gtaaaacgacggccagtagaggagaaaggcacagatgg

SEQ ID NO: 117783 - DNA, 21 bp, Artificial Sequence
  primer
aagggtggaacaaagttcagc

SEQ ID NO: 117784 - DNA, 21 bp, Artificial Sequence
  primer
catcagcagtcgatttcttcc

SEQ ID NO: 117785 - DNA, 38 bp, Artificial Sequence
  primer
gtaaaacgacggccagtgaggcagccagaaataggaag

SEQ ID NO: 117786 - DNA, 21 bp, Artificial Sequence
  primer
aatgaccttccagtctcaggg

SEQ ID NO: 117787 - DNA, 21 bp, Artificial Sequence
  primer
gaaccttccctcaagggtctc

SEQ ID NO: 117788 - DNA, 38 bp, Artificial Sequence
  primer
gtaaaacgacggccagtcgtagagaggaagtggttggg

SEQ ID NO: 117789 - DNA, 18 bp, Artificial Sequence
  primer
agccatagatggcgctgc

SEQ ID NO: 117790 - DNA, 35 bp, Artificial Sequence
  primer
gtaaaacgacggccagtgagcggtagcgtgatcgg

SEQ ID NO: 117791 - DNA, 38 bp, Artificial Sequence
  primer
gtaaaacgacggccagtcttccctagacctcggctgtc

SEQ ID NO: 117792 - DNA, 38 bp, Artificial Sequence
  primer
gtaaaacgacggccagttaggaaaggacggtatcctgc

SEQ ID NO: 117793 - DNA, 21 bp, Artificial Sequence
  primer
actgcgaaggagtgtgaaagg

SEQ ID NO: 117794 - DNA, 21 bp, Artificial Sequence
  primer
ggcagcaacactcaagaactg

SEQ ID NO: 117795 - DNA, 38 bp, Artificial Sequence
  primer
gtaaaacgacggccagtgctattgatgaacccagaggg

SEQ ID NO: 117796 - DNA, 39 bp, Artificial Sequence
  primer
gtaaaacgacggccagtggctgaatttaagtccctcctc

SEQ ID NO: 117797 - DNA, 38 bp, Artificial Sequence
  primer
gtaaaacgacggccagtctgggaatcaagggctcatag

SEQ ID NO: 117798 - DNA, 21 bp, Artificial Sequence
  primer
ctcctagcccaacacagaagg

SEQ ID NO: 117799 - DNA, 21 bp, Artificial Sequence
  primer
aaacggtaccaaatagccagc

SEQ ID NO: 117800 - DNA, 39 bp, Artificial Sequence
  primer
gtaaaacgacggccagtccttcaggtcaattcctctgtg

SEQ ID NO: 117801 - DNA, 21 bp, Artificial Sequence
  primer
tgtagctgaggatagggtggc

SEQ ID NO: 117802 - DNA, 21 bp, Artificial Sequence
  primer
aagcttagttcacccacaggg

SEQ ID NO: 117803 - DNA, 21 bp, Artificial Sequence
  primer
agacgggacttatcctctggg

SEQ ID NO: 117804 - DNA, 21 bp, Artificial Sequence
  primer
gtgtttaggccacctctcagc

SEQ ID NO: 117805 - DNA, 20 bp, Artificial Sequence
  primer
acacctacatgtgccatccc

SEQ ID NO: 117806 - DNA, 21 bp, Artificial Sequence
  primer
agcatagggtgagagaggcag

SEQ ID NO: 117807 - DNA, 22 bp, Artificial Sequence
  primer
cagtcaggtcaggaacaaatgg

SEQ ID NO: 117808 - DNA, 21 bp, Artificial Sequence
  primer
agagggctttccactcctctc

SEQ ID NO: 117809 - DNA, 21 bp, Artificial Sequence
  primer
tgagggagagaggaggcatag

SEQ ID NO: 117810 - DNA, 18 bp, Artificial Sequence
  primer
ccgtgttagccaggatgg

SEQ ID NO: 117811 - DNA, 21 bp, Artificial Sequence
  primer
tccctccttcctctctcatcc

SEQ ID NO: 117812 - DNA, 38 bp, Artificial Sequence
  primer
gtaaaacgacggccagttccaattctccctctttcacc

SEQ ID NO: 117813 - DNA, 21 bp, Artificial Sequence
  primer
agacctggtgaactgtctccc

SEQ ID NO: 117814 - DNA, 21 bp, Artificial Sequence
  primer
agtctcaggatagggaagggc

SEQ ID NO: 117815 - DNA, 38 bp, Artificial Sequence
  primer
gtaaaacgacggccagtcccttcagactcagttcctgg

SEQ ID NO: 117816 - DNA, 21 bp, Artificial Sequence
  primer
agcccaagagacagagaatgg

SEQ ID NO: 117817 - DNA, 20 bp, Artificial Sequence
  primer
ctcagaacagagtggcaggg

SEQ ID NO: 117818 - DNA, 37 bp, Artificial Sequence
  primer
gtaaaacgacggccagtctgatggagagattgccagc

SEQ ID NO: 117819 - DNA, 38 bp, Artificial Sequence
  primer
gtaaaacgacggccagtcgactacaaattccaaagccc

SEQ ID NO: 117820 - DNA, 36 bp, Artificial Sequence
  primer
gtaaaacgacggccagtgaaaccttgggctaagggc

SEQ ID NO: 117821 - DNA, 38 bp, Artificial Sequence
  primer
gtaaaacgacggccagtgtttcaccatcccttctctgg

SEQ ID NO: 117822 - DNA, 21 bp, Artificial Sequence
  primer
aaaggctgaaagtgatgtccc

SEQ ID NO: 117823 - DNA, 20 bp, Artificial Sequence
  primer
cactgtcacgacagaggcag

SEQ ID NO: 117824 - DNA, 21 bp, Artificial Sequence
  primer
ggtgatgctgagaactcctgc

SEQ ID NO: 117825 - DNA, 39 bp, Artificial Sequence
  primer
gtaaaacgacggccagtcacaggaagagcctcagctatg

SEQ ID NO: 117826 - DNA, 21 bp, Artificial Sequence
  primer
agagaaatgcctgtttccacc

SEQ ID NO: 117827 - DNA, 21 bp, Artificial Sequence
  primer
cagagcagactgggattgatg

SEQ ID NO: 117828 - DNA, 21 bp, Artificial Sequence
  primer
ctgcccaactccactcctaag

SEQ ID NO: 117829 - DNA, 21 bp, Artificial Sequence
  primer
ctgcctggatatctcctcctg

SEQ ID NO: 117830 - DNA, 21 bp, Artificial Sequence
  primer
ccataatggctgaggacaagc

SEQ ID NO: 117831 - DNA, 21 bp, Artificial Sequence
  primer
ctgttactggcaacagggagg

SEQ ID NO: 117832 - DNA, 20 bp, Artificial Sequence
  primer
caagcagtgcagagaccacc

SEQ ID NO: 117833 - DNA, 38 bp, Artificial Sequence
  primer
gtaaaacgacggccagtgcagagcgagtgagaggagtc

SEQ ID NO: 117834 - DNA, 24 bp, Artificial Sequence
  primer
ttaagtagcaggagattccctgag

SEQ ID NO: 117835 - DNA, 21 bp, Artificial Sequence
  primer
atctcaggtacctccgctgac

SEQ ID NO: 117836 - DNA, 21 bp, Artificial Sequence
  primer
ttctaacaattacccgctgcc

SEQ ID NO: 117837 - DNA, 20 bp, Artificial Sequence
  primer
ctcctgcaccaggttctgtc

SEQ ID NO: 117838 - DNA, 39 bp, Artificial Sequence
  primer
gtaaaacgacggccagtcagctagaacaggaacgtggac

SEQ ID NO: 117839 - DNA, 39 bp, Artificial Sequence
  primer
gtaaaacgacggccagtgacagacactaagccctgttgg

SEQ ID NO: 117840 - DNA, 37 bp, Artificial Sequence
  primer
gtaaaacgacggccagtagacctggaacctggctctg

SEQ ID NO: 117841 - DNA, 36 bp, Artificial Sequence
  primer
gtaaaacgacggccagtgaccctccaccgagacatc

SEQ ID NO: 117842 - DNA, 21 bp, Artificial Sequence
  primer
cacatccagcacctacaggac

SEQ ID NO: 117843 - DNA, 21 bp, Artificial Sequence
  primer
gagccaggctgagagagacag

SEQ ID NO: 117844 - DNA, 37 bp, Artificial Sequence
  primer
gtaaaacgacggccagtaccctggagttctgctcacc

SEQ ID NO: 117845 - DNA, 21 bp, Artificial Sequence
  primer
ctctctgctcctcccatcttg

SEQ ID NO: 117846 - DNA, 20 bp, Artificial Sequence
  primer
gcaggacaggcttgagtcag

SEQ ID NO: 117847 - DNA, 21 bp, Artificial Sequence
  primer
aggacctgcaaagtaccctcc

SEQ ID NO: 117848 - DNA, 38 bp, Artificial Sequence
  primer
gtaaaacgacggccagtctgcttcagggtcacagaaag

SEQ ID NO: 117849 - DNA, 38 bp, Artificial Sequence
  primer
gtaaaacgacggccagtgataaatgtactccagcgccc

SEQ ID NO: 117850 - DNA, 38 bp, Artificial Sequence
  primer
gtaaaacgacggccagtggctccgtcagaccacttaac

SEQ ID NO: 117851 - DNA, 21 bp, Artificial Sequence
  primer
cacagaggttgggcttagtgg

SEQ ID NO: 117852 - DNA, 21 bp, Artificial Sequence
  primer
cagctgggagaggtcgtaatg

SEQ ID NO: 117853 - DNA, 39 bp, Artificial Sequence
  primer
gtaaaacgacggccagtcctcccagagttattgcatttc

SEQ ID NO: 117854 - DNA, 20 bp, Artificial Sequence
  primer
tgaccatctggttagcaggg

SEQ ID NO: 117855 - DNA, 21 bp, Artificial Sequence
  primer
tcgaggactatgtgaagtggc

SEQ ID NO: 117856 - DNA, 21 bp, Artificial Sequence
  primer
tttggtagccagggtaaggag

SEQ ID NO: 117857 - DNA, 21 bp, Artificial Sequence
  primer
cagccgcttgtagttgaacag

SEQ ID NO: 117858 - DNA, 39 bp, Artificial Sequence
  primer
gtaaaacgacggccagtaatgcttaggctgtttcaggtg

SEQ ID NO: 117859 - DNA, 22 bp, Artificial Sequence
  primer
tccattcacaaacttactccca

SEQ ID NO: 117860 - DNA, 21 bp, Artificial Sequence
  primer
tggcttggatacactcgacag

SEQ ID NO: 117861 - DNA, 21 bp, Artificial Sequence
  primer
acaggacatcacagacatcgc

SEQ ID NO: 117862 - DNA, 43 bp, Artificial Sequence
  primer
gtaaaacgacggccagtgaacttcatttcaggatagtaaaggg

SEQ ID NO: 117863 - DNA, 21 bp, Artificial Sequence
  primer
aaggccaagcttcacattagc

SEQ ID NO: 117864 - DNA, 23 bp, Artificial Sequence
  primer
aaatacaacaggtctgaggttgg

SEQ ID NO: 117865 - DNA, 21 bp, Artificial Sequence
  primer
atggtggtaatctctgggtgg

SEQ ID NO: 117866 - DNA, 44 bp, Artificial Sequence
  primer
gtaaaacgacggccagttttggcaagactatcttatattggaac

SEQ ID NO: 117867 - DNA, 24 bp, Artificial Sequence
  primer
aacaatttcttccttctcccattc

SEQ ID NO: 117868 - DNA, 21 bp, Artificial Sequence
  primer
gagcgagactctgtctccaaa

SEQ ID NO: 117869 - DNA, 40 bp, Artificial Sequence
  primer
gtaaaacgacggccagttcagcaaagaggtaaacagcaat

SEQ ID NO: 117870 - DNA, 18 bp, Artificial Sequence
  primer
acggcctcggaaggtaag

SEQ ID NO: 117871 - DNA, 37 bp, Artificial Sequence
  primer
gtaaaacgacggccagtttcagttgccactcaaaccc

SEQ ID NO: 117872 - DNA, 38 bp, Artificial Sequence
  primer
gtaaaacgacggccagtcagggattgctggaagtaagg

SEQ ID NO: 117873 - DNA, 28 bp, Artificial Sequence
  primer
tcaataacccttacaatctgattatttc

SEQ ID NO: 117874 - DNA, 21 bp, Artificial Sequence
  primer
cttagaccagggctctcaacc

SEQ ID NO: 117875 - DNA, 24 bp, Artificial Sequence
  primer
caatctgccatgaatgataagaag

SEQ ID NO: 117876 - DNA, 19 bp, Artificial Sequence
  primer
ctgagagaggctcatgccc

SEQ ID NO: 117877 - DNA, 21 bp, Artificial Sequence
  primer
ttgtctctctggactcccacc

SEQ ID NO: 117878 - DNA, 21 bp, Artificial Sequence
  primer
agaggtcaccacccagctatc

SEQ ID NO: 117879 - DNA, 21 bp, Artificial Sequence
  primer
taacaatgcaggtgatgccac

SEQ ID NO: 117880 - DNA, 38 bp, Artificial Sequence
  primer
gtaaaacgacggccagtctccttctcatagacgtcggg

SEQ ID NO: 117881 - DNA, 38 bp, Artificial Sequence
  primer
gtaaaacgacggccagtagggagaaccagaagtcagcc

SEQ ID NO: 117882 - DNA, 38 bp, Artificial Sequence
  primer
gtaaaacgacggccagtgagaacagaaggtcagaggcg

SEQ ID NO: 117883 - DNA, 37 bp, Artificial Sequence
  primer
gtaaaacgacggccagtgcatgaatggtggacacagg

SEQ ID NO: 117884 - DNA, 21 bp, Artificial Sequence
  primer
tcaagaaggaagcatagcacc

SEQ ID NO: 117885 - DNA, 21 bp, Artificial Sequence
  primer
aacctgggactggttgagttg

SEQ ID NO: 117886 - DNA, 21 bp, Artificial Sequence
  primer
cactgtgacaggctggagaag

SEQ ID NO: 117887 - DNA, 38 bp, Artificial Sequence
  primer
gtaaaacgacggccagttcagtgatcagttcgagtggg

SEQ ID NO: 117888 - DNA, 36 bp, Artificial Sequence
  primer
gtaaaacgacggccagtacagagacgcacaggttgg

SEQ ID NO: 117889 - DNA, 20 bp, Artificial Sequence
  primer
gaggtaccacaaggcaccaa

SEQ ID NO: 117890 - DNA, 22 bp, Artificial Sequence
  primer
tttacacagcaaagttgggatg

SEQ ID NO: 117891 - DNA, 38 bp, Artificial Sequence
  primer
gtaaaacgacggccagtgcacactgagaatggcatagc

SEQ ID NO: 117892 - DNA, 21 bp, Artificial Sequence
  primer
gacacacacgtcaccttgacc

SEQ ID NO: 117893 - DNA, 22 bp, Artificial Sequence
  primer
tggttacccatcctcatcattc

SEQ ID NO: 117894 - DNA, 21 bp, Artificial Sequence
  primer
aggaacgcttgagcttattgc

SEQ ID NO: 117895 - DNA, 21 bp, Artificial Sequence
  primer
gtgtggtaattgtcctccacg

SEQ ID NO: 117896 - DNA, 38 bp, Artificial Sequence
  primer
gtaaaacgacggccagtcgagtcagctctgtcacttgg

SEQ ID NO: 117897 - DNA, 21 bp, Artificial Sequence
  primer
ctcttcccgtgacctgttctc

SEQ ID NO: 117898 - DNA, 37 bp, Artificial Sequence
  primer
gtaaaacgacggccagtaagtacggccctgcttcatc

SEQ ID NO: 117899 - DNA, 21 bp, Artificial Sequence
  primer
tacctctgactccaatgcagg

SEQ ID NO: 117900 - DNA, 37 bp, Artificial Sequence
  primer
gtaaaacgacggccagtcagtgtcactcacagggcag

SEQ ID NO: 117901 - DNA, 22 bp, Artificial Sequence
  primer
ggctctagctggctaatggaag

SEQ ID NO: 117902 - DNA, 38 bp, Artificial Sequence
  primer
gtaaaacgacggccagttccaaggtcaggttcatgagg

SEQ ID NO: 117903 - DNA, 44 bp, Artificial Sequence
  primer
gtaaaacgacggccagttgttagaagggaaatttcataattgtt

SEQ ID NO: 117904 - DNA, 38 bp, Artificial Sequence
  primer
gtaaaacgacggccagtggacaatcaaattgacctcca

SEQ ID NO: 117905 - DNA, 35 bp, Artificial Sequence
  primer
gtaaaacgacggccagtggacagcagccctggaag

SEQ ID NO: 117906 - DNA, 21 bp, Artificial Sequence
  primer
tgtatatgggcaaactgctcg

SEQ ID NO: 117907 - DNA, 21 bp, Artificial Sequence
  primer
agtggtgtcagacggaatgtg

SEQ ID NO: 117908 - DNA, 21 bp, Artificial Sequence
  primer
aactctgaggaggtagcagcc

SEQ ID NO: 117909 - DNA, 39 bp, Artificial Sequence
  primer
gtaaaacgacggccagttcgtaattgatgagctgttccc

SEQ ID NO: 117910 - DNA, 37 bp, Artificial Sequence
  primer
gtaaaacgacggccagtctttaacaaggcaccatccg

SEQ ID NO: 117911 - DNA, 21 bp, Artificial Sequence
  primer
ctcggcagaacaagtgtcaac

SEQ ID NO: 117912 - DNA, 38 bp, Artificial Sequence
  primer
gtaaaacgacggccagtggaggctccgatagttgtgag

SEQ ID NO: 117913 - DNA, 38 bp, Artificial Sequence
  primer
gtaaaacgacggccagtaggagtacgttcgcattggag

SEQ ID NO: 117914 - DNA, 38 bp, Artificial Sequence
  primer
gtaaaacgacggccagttgtaggctcacagcctcttcc

SEQ ID NO: 117915 - DNA, 39 bp, Artificial Sequence
  primer
gtaaaacgacggccagtaaccattattcacacacggaaa

SEQ ID NO: 117916 - DNA, 38 bp, Artificial Sequence
  primer
gtaaaacgacggccagttgtgtacggaaagactgtggg

SEQ ID NO: 117917 - DNA, 38 bp, Artificial Sequence
  primer
gtaaaacgacggccagtagacaagcagtgggaaggaag

SEQ ID NO: 117918 - DNA, 21 bp, Artificial Sequence
  primer
gcgaggtacagaaacctccac

SEQ ID NO: 117919 - DNA, 38 bp, Artificial Sequence
  primer
gtaaaacgacggccagtcagttaagttatcccaggccc

SEQ ID NO: 117920 - DNA, 21 bp, Artificial Sequence
  primer
tccacttcccttcatctctgg

SEQ ID NO: 117921 - DNA, 36 bp, Artificial Sequence
  primer
gtaaaacgacggccagtaagtgattcgcccaccttg

SEQ ID NO: 117922 - DNA, 21 bp, Artificial Sequence
  primer
agggtgagaggtgtggaagac

SEQ ID NO: 117923 - DNA, 38 bp, Artificial Sequence
  primer
gtaaaacgacggccagttctcagtgtcattggcctgtt

SEQ ID NO: 117924 - DNA, 21 bp, Artificial Sequence
  primer
gtttctcccactcagtcaccc

SEQ ID NO: 117925 - DNA, 21 bp, Artificial Sequence
  primer
atgtaacaaacctgcccattg

SEQ ID NO: 117926 - DNA, 38 bp, Artificial Sequence
  primer
gtaaaacgacggccagtacggtccagaataagcctgtg

SEQ ID NO: 117927 - DNA, 38 bp, Artificial Sequence
  primer
gtaaaacgacggccagtgggagcaccctagacttggag

SEQ ID NO: 117928 - DNA, 38 bp, Artificial Sequence
  primer
gtaaaacgacggccagtatacacactctggccctccac

SEQ ID NO: 117929 - DNA, 35 bp, Artificial Sequence
  primer
gtaaaacgacggccagtccaagactcgcgacaccc

SEQ ID NO: 117930 - DNA, 21 bp, Artificial Sequence
  primer
aagaagagacctgttgtgggc

SEQ ID NO: 117931 - DNA, 20 bp, Artificial Sequence
  primer
ttcctaaacatggcagctcg

SEQ ID NO: 117932 - DNA, 21 bp, Artificial Sequence
  primer
ccctcgtttacctttgagcag

SEQ ID NO: 117933 - DNA, 38 bp, Artificial Sequence
  primer
gtaaaacgacggccagtactccttcccgtgccaataag

SEQ ID NO: 117934 - DNA, 21 bp, Artificial Sequence
  primer
tcgaggctgcagtaagctatg

SEQ ID NO: 117935 - DNA, 37 bp, Artificial Sequence
  primer
gtaaaacgacggccagttccaatgtccaccttcaacc

SEQ ID NO: 117936 - DNA, 21 bp, Artificial Sequence
  primer
ggagaccggaaagctgaagac

SEQ ID NO: 117937 - DNA, 38 bp, Artificial Sequence
  primer
gtaaaacgacggccagttgctcagtcccaactttctgc

SEQ ID NO: 117938 - DNA, 37 bp, Artificial Sequence
  primer
gtaaaacgacggccagtgttgtttgaaggccatttgc

SEQ ID NO: 117939 - DNA, 21 bp, Artificial Sequence
  primer
cgagttgaggttgacgttgag

SEQ ID NO: 117940 - DNA, 36 bp, Artificial Sequence
  primer
gtaaaacgacggccagtgtcccagggtgtaggaggg

SEQ ID NO: 117941 - DNA, 38 bp, Artificial Sequence
  primer
gtaaaacgacggccagtgagaacagtcaggtgctgagg

SEQ ID NO: 117942 - DNA, 38 bp, Artificial Sequence
  primer
gtaaaacgacggccagtctcagcagcggcatatacaag

SEQ ID NO: 117943 - DNA, 38 bp, Artificial Sequence
  primer
gtaaaacgacggccagtgcagcatgacagaatgaggtc

SEQ ID NO: 117944 - DNA, 38 bp, Artificial Sequence
  primer
gtaaaacgacggccagtctcgtccttgagcttcttgag

SEQ ID NO: 117945 - DNA, 37 bp, Artificial Sequence
  primer
gtaaaacgacggccagtaagcgagtggattctgagcc

SEQ ID NO: 117946 - DNA, 20 bp, Artificial Sequence
  primer
aagagattcggcaaattggg

SEQ ID NO: 117947 - DNA, 38 bp, Artificial Sequence
  primer
gtaaaacgacggccagtgcagcaagaacgattaacagc

SEQ ID NO: 117948 - DNA, 18 bp, Artificial Sequence
  primer
ccagctgatgctgccaag

SEQ ID NO: 117949 - DNA, 35 bp, Artificial Sequence
  primer
gtaaaacgacggccagtgcctgccaaaccacacag

SEQ ID NO: 117950 - DNA, 38 bp, Artificial Sequence
  primer
gtaaaacgacggccagtgttgggtaggttgggtgtgac

SEQ ID NO: 117951 - DNA, 21 bp, Artificial Sequence
  primer
gtgactcacagtaggcctggg

SEQ ID NO: 117952 - DNA, 18 bp, Artificial Sequence
  primer
tgggctctcccacctagc

SEQ ID NO: 117953 - DNA, 21 bp, Artificial Sequence
  primer
agtttggactggaaggcagag

SEQ ID NO: 117954 - DNA, 21 bp, Artificial Sequence
  primer
attggtgggtcctgaagtgtg

SEQ ID NO: 117955 - DNA, 21 bp, Artificial Sequence
  primer
ctcatccactgccttcagctc

SEQ ID NO: 117956 - DNA, 21 bp, Artificial Sequence
  primer
aacagttccggctacttcctg

SEQ ID NO: 117957 - DNA, 20 bp, Artificial Sequence
  primer
gtcattctggtgcaagtggg

SEQ ID NO: 117958 - DNA, 38 bp, Artificial Sequence
  primer
gtaaaacgacggccagttaggcagacttgatgtccagg

SEQ ID NO: 117959 - DNA, 18 bp, Artificial Sequence
  primer
cagcttgcagagcttcgg

SEQ ID NO: 117960 - DNA, 20 bp, Artificial Sequence
  primer
ccctcctcgaactccatctg

SEQ ID NO: 117961 - DNA, 38 bp, Artificial Sequence
  primer
gtaaaacgacggccagtcttccctcctctcaaagcagc

SEQ ID NO: 117962 - DNA, 37 bp, Artificial Sequence
  primer
gtaaaacgacggccagtgggtggactcaccaatgaac

SEQ ID NO: 117963 - DNA, 38 bp, Artificial Sequence
  primer
gtaaaacgacggccagtcctgcaggtttctctagtggc

SEQ ID NO: 117964 - DNA, 35 bp, Artificial Sequence
  primer
gtaaaacgacggccagtcctcccttgccacacgag

SEQ ID NO: 117965 - DNA, 18 bp, Artificial Sequence
  primer
gctcgccaccctacttcc

SEQ ID NO: 117966 - DNA, 21 bp, Artificial Sequence
  primer
ctgtgatctctccggtgactg

SEQ ID NO: 117967 - DNA, 22 bp, Artificial Sequence
  primer
ttgctatcacaaatggtgcttc

SEQ ID NO: 117968 - DNA, 43 bp, Artificial Sequence
  primer
gtaaaacgacggccagttcctcctattataacaagctttcctc

SEQ ID NO: 117969 - DNA, 21 bp, Artificial Sequence
  primer
gacgttactgacacattcgcc

SEQ ID NO: 117970 - DNA, 27 bp, Artificial Sequence
  primer
ttacaaacagcatattaaattctcaag

SEQ ID NO: 117971 - DNA, 21 bp, Artificial Sequence
  primer
catacaaccttcaattgcgga

SEQ ID NO: 117972 - DNA, 21 bp, Artificial Sequence
  primer
ctgtgatctctccggtgactg

SEQ ID NO: 117973 - DNA, 21 bp, Artificial Sequence
  primer
ctgtgatctctccggtgactg

SEQ ID NO: 117974 - DNA, 37 bp, Artificial Sequence
  primer
gtaaaacgacggccagtcccttcgattctgaaaccag

SEQ ID NO: 117975 - DNA, 36 bp, Artificial Sequence
  primer
gtaaaacgacggccagtctcaccggacctggaactc

SEQ ID NO: 117976 - DNA, 39 bp, Artificial Sequence
  primer
gtaaaacgacggccagtaacttctgacaagaccactggg

SEQ ID NO: 117977 - DNA, 21 bp, Artificial Sequence
  primer
ttcgtgggtttattgagggtc

SEQ ID NO: 117978 - DNA, 21 bp, Artificial Sequence
  primer
ccctgaacaggaggtcatcag

SEQ ID NO: 117979 - DNA, 38 bp, Artificial Sequence
  primer
gtaaaacgacggccagtagggaacagctgtgaaagacc

SEQ ID NO: 117980 - DNA, 37 bp, Artificial Sequence
  primer
gtaaaacgacggccagtatggtaccgtggagcacttg

SEQ ID NO: 117981 - DNA, 38 bp, Artificial Sequence
  primer
gtaaaacgacggccagttgagctcaagcaatcttcctg

SEQ ID NO: 117982 - DNA, 35 bp, Artificial Sequence
  primer
gtaaaacgacggccagtagcaagctgccctatccg

SEQ ID NO: 117983 - DNA, 19 bp, Artificial Sequence
  primer
cacatttgggctgtgcaac

SEQ ID NO: 117984 - DNA, 21 bp, Artificial Sequence
  primer
acctcatgcagacacatgcac

SEQ ID NO: 117985 - DNA, 20 bp, Artificial Sequence
  primer
gatgtgcagctcagtccacc

SEQ ID NO: 117986 - DNA, 21 bp, Artificial Sequence
  primer
gaggccttcaggctaggtagg

SEQ ID NO: 117987 - DNA, 21 bp, Artificial Sequence
  primer
agctggttagtgaggaggagc

SEQ ID NO: 117988 - DNA, 21 bp, Artificial Sequence
  primer
aacacacagaccatgagcagg

SEQ ID NO: 117989 - DNA, 35 bp, Artificial Sequence
  primer
gtaaaacgacggccagtgagcagcagtggagtggg

SEQ ID NO: 117990 - DNA, 21 bp, Artificial Sequence
  primer
agctggttagtgaggaggagc

SEQ ID NO: 117991 - DNA, 38 bp, Artificial Sequence
  primer
gtaaaacgacggccagtacaatctgctccaccataggc

SEQ ID NO: 117992 - DNA, 21 bp, Artificial Sequence
  primer
gacaggaggtaaagagccagg

SEQ ID NO: 117993 - DNA, 38 bp, Artificial Sequence
  primer
gtaaaacgacggccagtagatggtttccaacccacatc

SEQ ID NO: 117994 - DNA, 21 bp, Artificial Sequence
  primer
caggaagctcaagaaccaagc

SEQ ID NO: 117995 - DNA, 38 bp, Artificial Sequence
  primer
gtaaaacgacggccagtcaaacgtaggccaaagtggtc

SEQ ID NO: 117996 - DNA, 21 bp, Artificial Sequence
  primer
gaatctgtgacgctgctgaag

SEQ ID NO: 117997 - DNA, 21 bp, Artificial Sequence
  primer
ccaacaatggagatacccagg

SEQ ID NO: 117998 - DNA, 38 bp, Artificial Sequence
  primer
gtaaaacgacggccagttcatgtcattcacctggaagc

SEQ ID NO: 117999 - DNA, 20 bp, Artificial Sequence
  primer
tcaggtgatccacccatctg

SEQ ID NO: 118000 - DNA, 21 bp, Artificial Sequence
  primer
aaatgacccattctcagtccc

SEQ ID NO: 118001 - DNA, 21 bp, Artificial Sequence
  primer
ggtaaccagagtcagggatcg

SEQ ID NO: 118002 - DNA, 38 bp, Artificial Sequence
  primer
gtaaaacgacggccagtttcttccaactcctgctctcg

SEQ ID NO: 118003 - DNA, 21 bp, Artificial Sequence
  primer
gggctaggtctagggttggag

SEQ ID NO: 118004 - DNA, 37 bp, Artificial Sequence
  primer
gtaaaacgacggccagtcaactgagtcctcacccagg

SEQ ID NO: 118005 - DNA, 36 bp, Artificial Sequence
  primer
gtaaaacgacggccagtcagactcactgccactgcc

SEQ ID NO: 118006 - DNA, 20 bp, Artificial Sequence
  primer
ctgagcccaggcactgtaag

SEQ ID NO: 118007 - DNA, 38 bp, Artificial Sequence
  primer
gtaaaacgacggccagttgtagcgaggcaagtcgaaac

SEQ ID NO: 118008 - DNA, 21 bp, Artificial Sequence
  primer
aatctcagtgatgcctttccc

SEQ ID NO: 118009 - DNA, 21 bp, Artificial Sequence
  primer
ctgcagggaagagacttgatg

SEQ ID NO: 118010 - DNA, 21 bp, Artificial Sequence
  primer
gtagggcaagaaggtgggtag

SEQ ID NO: 118011 - DNA, 37 bp, Artificial Sequence
  primer
gtaaaacgacggccagtcaacacaaagcccataagcc

SEQ ID NO: 118012 - DNA, 21 bp, Artificial Sequence
  primer
ccaaggttctcaacactgcac

SEQ ID NO: 118013 - DNA, 21 bp, Artificial Sequence
  primer
tgtcatagccctgatggtgag

SEQ ID NO: 118014 - DNA, 38 bp, Artificial Sequence
  primer
gtaaaacgacggccagtgaaggagcagggtacagatgg

SEQ ID NO: 118015 - DNA, 21 bp, Artificial Sequence
  primer
ccagcacttggctacagtcag

SEQ ID NO: 118016 - DNA, 21 bp, Artificial Sequence
  primer
gcccaacaggatagatatggg

SEQ ID NO: 118017 - DNA, 38 bp, Artificial Sequence
  primer
gtaaaacgacggccagtcctctctgatgctcaagcaag

SEQ ID NO: 118018 - DNA, 20 bp, Artificial Sequence
  primer
atcaaaggaagggtccaagg

SEQ ID NO: 118019 - DNA, 20 bp, Artificial Sequence
  primer
cagagtctgctgccacttcc

SEQ ID NO: 118020 - DNA, 36 bp, Artificial Sequence
  primer
gtaaaacgacggccagttgtaggaggcaaacagggc

SEQ ID NO: 118021 - DNA, 37 bp, Artificial Sequence
  primer
gtaaaacgacggccagtaaagacggacggatggagag

SEQ ID NO: 118022 - DNA, 21 bp, Artificial Sequence
  primer
cctccatttcaatgtcttccc

SEQ ID NO: 118023 - DNA, 21 bp, Artificial Sequence
  primer
cccaatatagcaaacccttgg

SEQ ID NO: 118024 - DNA, 21 bp, Artificial Sequence
  primer
caggaaagtagcaactgtggg

SEQ ID NO: 118025 - DNA, 37 bp, Artificial Sequence
  primer
gtaaaacgacggccagtcacacaagttgatatggccc

SEQ ID NO: 118026 - DNA, 21 bp, Artificial Sequence
  primer
agccaagcatgtgtcatattg

SEQ ID NO: 118027 - DNA, 21 bp, Artificial Sequence
  primer
accacagtccatttccatcaa

SEQ ID NO: 118028 - DNA, 23 bp, Artificial Sequence
  primer
ttcccgaatctataatctcaccc

SEQ ID NO: 118029 - DNA, 39 bp, Artificial Sequence
  primer
gtaaaacgacggccagtactttcttcttcatccacatgc

SEQ ID NO: 118030 - DNA, 21 bp, Artificial Sequence
  primer
tccacatgcatgaaagtcaaa

SEQ ID NO: 118031 - DNA, 22 bp, Artificial Sequence
  primer
aaggacccacaaacttctcaac

SEQ ID NO: 118032 - DNA, 39 bp, Artificial Sequence
  primer
gtaaaacgacggccagtaaggacccacaaacttctcaac

SEQ ID NO: 118033 - DNA, 21 bp, Artificial Sequence
  primer
acctggttggagatatgggac

SEQ ID NO: 118034 - DNA, 38 bp, Artificial Sequence
  primer
gtaaaacgacggccagtgaggatgggtagatggcacag

SEQ ID NO: 118035 - DNA, 21 bp, Artificial Sequence
  primer
accagctgcacaaattcaatg

SEQ ID NO: 118036 - DNA, 38 bp, Artificial Sequence
  primer
gtaaaacgacggccagttattaatggtggcagccaagc

SEQ ID NO: 118037 - DNA, 38 bp, Artificial Sequence
  primer
gtaaaacgacggccagtggttggttgtccatgaaagaa

SEQ ID NO: 118038 - DNA, 26 bp, Artificial Sequence
  primer
tcagatataaaggatgcttgaccttc

SEQ ID NO: 118039 - DNA, 38 bp, Artificial Sequence
  primer
gtaaaacgacggccagtaagggatagcatttggcgata

SEQ ID NO: 118040 - DNA, 22 bp, Artificial Sequence
  primer
acaggttctcacaggaacatct

SEQ ID NO: 118041 - DNA, 42 bp, Artificial Sequence
  primer
gtaaaacgacggccagtcaggaacatctaccagaaagaaatg

SEQ ID NO: 118042 - DNA, 22 bp, Artificial Sequence
  primer
caaatcagtgttactggccaaa

SEQ ID NO: 118043 - DNA, 22 bp, Artificial Sequence
  primer
tttcaaccaaacaagaaggtga

SEQ ID NO: 118044 - DNA, 41 bp, Artificial Sequence
  primer
gtaaaacgacggccagtaaaggaaccaccatagtatccatc

SEQ ID NO: 118045 - DNA, 21 bp, Artificial Sequence
  primer
ccggattcaagtgattctcct

SEQ ID NO: 118046 - DNA, 37 bp, Artificial Sequence
  primer
gtaaaacgacggccagtaactcccgaccaagtgatcc

SEQ ID NO: 118047 - DNA, 40 bp, Artificial Sequence
  primer
gtaaaacgacggccagtcaacacacacacagattaccaca

SEQ ID NO: 118048 - DNA, 23 bp, Artificial Sequence
  primer
caacacacacacagattaccaca

SEQ ID NO: 118049 - DNA, 21 bp, Artificial Sequence
  primer
tcacagttctgaggagccctt

SEQ ID NO: 118050 - DNA, 38 bp, Artificial Sequence
  primer
gtaaaacgacggccagtggatatgcagtggcatgaaag

SEQ ID NO: 118051 - DNA, 21 bp, Artificial Sequence
  primer
aaacacactcgtgcaatcctc

SEQ ID NO: 118052 - DNA, 21 bp, Artificial Sequence
  primer
gccaactagcaccaattctcc

SEQ ID NO: 118053 - DNA, 27 bp, Artificial Sequence
  primer
aagattcacttacagtgttatgtctgc

SEQ ID NO: 118054 - DNA, 23 bp, Artificial Sequence
  primer
tcaagtcaatccactcagctatg

SEQ ID NO: 118055 - DNA, 39 bp, Artificial Sequence
  primer
gtaaaacgacggccagtttagtttccagcaatttgggtg

SEQ ID NO: 118056 - DNA, 43 bp, Artificial Sequence
  primer
gtaaaacgacggccagtaaatgttaggactaactcgacacaac

SEQ ID NO: 118057 - DNA, 42 bp, Artificial Sequence
  primer
gtaaaacgacggccagttcagggtacatagaacatcacacag

SEQ ID NO: 118058 - DNA, 23 bp, Artificial Sequence
  primer
aaccacacatacagcttacaacg

SEQ ID NO: 118059 - DNA, 38 bp, Artificial Sequence
  primer
gtaaaacgacggccagttcaggcaaatcacgtcaactc

SEQ ID NO: 118060 - DNA, 21 bp, Artificial Sequence
  primer
ccaaacaactaaccacccgat

SEQ ID NO: 118061 - DNA, 40 bp, Artificial Sequence
  primer
gtaaaacgacggccagttttacacaaaggatttggtgagc

SEQ ID NO: 118062 - DNA, 39 bp, Artificial Sequence
  primer
gtaaaacgacggccagttctgtttgcaaatatggagtgg

SEQ ID NO: 118063 - DNA, 22 bp, Artificial Sequence
  primer
ttcatacaccaaaggaagcaca

SEQ ID NO: 118064 - DNA, 25 bp, Artificial Sequence
  primer
aaattaaatgaagcaggtttcaaag

SEQ ID NO: 118065 - DNA, 22 bp, Artificial Sequence
  primer
tgagtacatgcacacacacaaa

SEQ ID NO: 118066 - DNA, 41 bp, Artificial Sequence
  primer
gtaaaacgacggccagttgtaacttcctagcaggcttcatc

SEQ ID NO: 118067 - DNA, 38 bp, Artificial Sequence
  primer
gtaaaacgacggccagtctccctttagttcttcgcagc

SEQ ID NO: 118068 - DNA, 21 bp, Artificial Sequence
  primer
tcaaagcctagggttagccac

SEQ ID NO: 118069 - DNA, 38 bp, Artificial Sequence
  primer
gtaaaacgacggccagttttccttgctgcattaaaccc

SEQ ID NO: 118070 - DNA, 25 bp, Artificial Sequence
  primer
ttaacagaattattccaattcccac

SEQ ID NO: 118071 - DNA, 38 bp, Artificial Sequence
  primer
gtaaaacgacggccagttttcccaatccataatcccac

SEQ ID NO: 118072 - DNA, 27 bp, Artificial Sequence
  primer
tcatcaatatgacaactactaggaatg

SEQ ID NO: 118073 - DNA, 39 bp, Artificial Sequence
  primer
gtaaaacgacggccagtaggaagggctgttaacaacaag

SEQ ID NO: 118074 - DNA, 23 bp, Artificial Sequence
  primer
tgctgtccaacagaaataaacaa

SEQ ID NO: 118075 - DNA, 41 bp, Artificial Sequence
  primer
gtaaaacgacggccagtcgccaacctaatacctacactgtc

SEQ ID NO: 118076 - DNA, 44 bp, Artificial Sequence
  primer
gtaaaacgacggccagttgacctcacatttgaatgattaagtag

SEQ ID NO: 118077 - DNA, 23 bp, Artificial Sequence
  primer
aatcaaacactggtccatacctg

SEQ ID NO: 118078 - DNA, 44 bp, Artificial Sequence
  primer
gtaaaacgacggccagtcccactctattaacaaatttaatcaac

SEQ ID NO: 118079 - DNA, 38 bp, Artificial Sequence
  primer
gtaaaacgacggccagtgtcattctaaaggcacctggc

SEQ ID NO: 118080 - DNA, 38 bp, Artificial Sequence
  primer
gtaaaacgacggccagtaaggtattagcagccactggg

SEQ ID NO: 118081 - DNA, 38 bp, Artificial Sequence
  primer
gtaaaacgacggccagttcagctttgccctcttgtagc

SEQ ID NO: 118082 - DNA, 44 bp, Artificial Sequence
  primer
gtaaaacgacggccagtaaagtttagggtaaataggtcacactt

SEQ ID NO: 118083 - DNA, 21 bp, Artificial Sequence
  primer
ggttacccaaggcttgttgtc

SEQ ID NO: 118084 - DNA, 38 bp, Artificial Sequence
  primer
gtaaaacgacggccagtagcctctccaaaccctgactc

SEQ ID NO: 118085 - DNA, 21 bp, Artificial Sequence
  primer
gcatagtatacctgcccagcc

SEQ ID NO: 118086 - DNA, 21 bp, Artificial Sequence
  primer
cttgaagccactgaaccactg

SEQ ID NO: 118087 - DNA, 21 bp, Artificial Sequence
  primer
tgctctgaagacatcagcctc

SEQ ID NO: 118088 - DNA, 38 bp, Artificial Sequence
  primer
gtaaaacgacggccagtcctaataatcccatcccagcc

SEQ ID NO: 118089 - DNA, 21 bp, Artificial Sequence
  primer
tcaaagtacttgcgagccttg

SEQ ID NO: 118090 - DNA, 21 bp, Artificial Sequence
  primer
gaagggaaagacacaagggag

SEQ ID NO: 118091 - DNA, 38 bp, Artificial Sequence
  primer
gtaaaacgacggccagtaagacccagtaaccaggtccc

SEQ ID NO: 118092 - DNA, 36 bp, Artificial Sequence
  primer
gtaaaacgacggccagtagccatgggtgatggagac

SEQ ID NO: 118093 - DNA, 21 bp, Artificial Sequence
  primer
tagcagcaattccagtcaagg

SEQ ID NO: 118094 - DNA, 38 bp, Artificial Sequence
  primer
gtaaaacgacggccagtgtcctggaagcggaggtagtc

SEQ ID NO: 118095 - DNA, 21 bp, Artificial Sequence
  primer
aagacccagtaaccaggtccc

SEQ ID NO: 118096 - DNA, 21 bp, Artificial Sequence
  primer
gcttcattgcttgttcaggtg

SEQ ID NO: 118097 - DNA, 39 bp, Artificial Sequence
  primer
gtaaaacgacggccagtgacctcatacctgtaagccacg

SEQ ID NO: 118098 - DNA, 21 bp, Artificial Sequence
  primer
aataccgcttctaccctgctg

SEQ ID NO: 118099 - DNA, 38 bp, Artificial Sequence
  primer
gtaaaacgacggccagtcctccgtttaggaccacagag

SEQ ID NO: 118100 - DNA, 21 bp, Artificial Sequence
  primer
ggaagctgagctagaaggtgg

SEQ ID NO: 118101 - DNA, 21 bp, Artificial Sequence
  primer
acccagtaaggctcagcaatg

SEQ ID NO: 118102 - DNA, 36 bp, Artificial Sequence
  primer
gtaaaacgacggccagtgactttgttcgaggtcccg

SEQ ID NO: 118103 - DNA, 37 bp, Artificial Sequence
  primer
gtaaaacgacggccagtggctgcttgtatctcgaccc

SEQ ID NO: 118104 - DNA, 21 bp, Artificial Sequence
  primer
gcttcattgcttgttcaggtg

SEQ ID NO: 118105 - DNA, 39 bp, Artificial Sequence; identical to SEQ ID NO: 118097
  primer

SEQ ID NO: 118106 - DNA, 38 bp, Artificial Sequence
  primer
gtaaaacgacggccagttgttctcgggcttaaggtcac

SEQ ID NO: 118107 - DNA, 21 bp, Artificial Sequence
  primer
cctccgtttaggaccacagag

SEQ ID NO: 118108 - DNA, 21 bp, Artificial Sequence
  primer
ggaagctgagctagaaggtgg

SEQ ID NO: 118109 - DNA, 21 bp, Artificial Sequence
  primer
acccagtaaggctcagcaatg

SEQ ID NO: 118110 - DNA, 21 bp, Artificial Sequence
  primer
cagctctaacactggctgtgc

SEQ ID NO: 118111 - DNA, 23 bp, Artificial Sequence
  primer
tggaccacagacattgttattcc

SEQ ID NO: 118112 - DNA, 21 bp, Artificial Sequence
  primer
ctcataggcagtgaggtggtg

SEQ ID NO: 118113 - DNA, 21 bp, Artificial Sequence
  primer
tttgtgatcatagaccctggc

SEQ ID NO: 118114 - DNA, 21 bp, Artificial Sequence
  primer
gaaacagctggacccaaagtc

SEQ ID NO: 118115 - DNA, 21 bp, Artificial Sequence
  primer
gtgctgtagcggcttcctaag

SEQ ID NO: 118116 - DNA, 21 bp, Artificial Sequence
  primer
tcacaccctttcagtgctgtc

SEQ ID NO: 118117 - DNA, 21 bp, Artificial Sequence
  primer
ttggcaatacactgcataggg

SEQ ID NO: 118118 - DNA, 40 bp, Artificial Sequence
  primer
gtaaaacgacggccagtgctggttaggtaattagcccttg

SEQ ID NO: 118119 - DNA, 39 bp, Artificial Sequence
  primer
gtaaaacgacggccagtactgagggctcactctacctcc

SEQ ID NO: 118120 - DNA, 20 bp, Artificial Sequence
  primer
ctcactccagcgcagcttag

SEQ ID NO: 118121 - DNA, 21 bp, Artificial Sequence
  primer
tttccttggtttggcactacc

SEQ ID NO: 118122 - DNA, 20 bp, Artificial Sequence
  primer
agaggcacagtcaggaaggg

SEQ ID NO: 118123 - DNA, 21 bp, Artificial Sequence
  primer
ataccaagatggcctgctttc

SEQ ID NO: 118124 - DNA, 21 bp, Artificial Sequence
  primer
tgccctcccttgatatactgc

SEQ ID NO: 118125 - DNA, 38 bp, Artificial Sequence
  primer
gtaaaacgacggccagtgagaagcgaagcaccttgttc

SEQ ID NO: 118126 - DNA, 21 bp, Artificial Sequence
  primer
acaacaacaaggtatgcaggc

SEQ ID NO: 118127 - DNA, 21 bp, Artificial Sequence
  primer
accctgttcccactgtgactc

SEQ ID NO: 118128 - DNA, 21 bp, Artificial Sequence
  primer
gccctgacaaccacacagtag

SEQ ID NO: 118129 - DNA, 40 bp, Artificial Sequence
  primer
gtaaaacgacggccagttccttcagaaatgcttaaacagc

SEQ ID NO: 118130 - DNA, 25 bp, Artificial Sequence
  primer
ccaattggccatgttaatagagttt

SEQ ID NO: 118131 - DNA, 21 bp, Artificial Sequence
  primer
cctcagtttccctctgagtcg

SEQ ID NO: 118132 - DNA, 21 bp, Artificial Sequence
  primer
cacctcaaggacactgctgag

SEQ ID NO: 118133 - DNA, 21 bp, Artificial Sequence
  primer
tcccaacatctatcactgggc

SEQ ID NO: 118134 - DNA, 38 bp, Artificial Sequence
  primer
gtaaaacgacggccagtgaagtcagatgcatgtctggg

SEQ ID NO: 118135 - DNA, 38 bp, Artificial Sequence
  primer
gtaaaacgacggccagtactgcaccctcttctttccag

SEQ ID NO: 118136 - DNA, 21 bp, Artificial Sequence
  primer
aggatcccacacacatcttcc

SEQ ID NO: 118137 - DNA, 21 bp, Artificial Sequence
  primer
tcttgaatgaattgccaggtg

SEQ ID NO: 118138 - DNA, 21 bp, Artificial Sequence
  primer
tcaggctttaacacgtctccc

SEQ ID NO: 118139 - DNA, 37 bp, Artificial Sequence
  primer
gtaaaacgacggccagtggtgaaaggagatgctgtgc

SEQ ID NO: 118140 - DNA, 21 bp, Artificial Sequence
  primer
gaatgacctgctttctctccc

SEQ ID NO: 118141 - DNA, 21 bp, Artificial Sequence
  primer
taccttgcacccagagcattc

SEQ ID NO: 118142 - DNA, 21 bp, Artificial Sequence
  primer
tttcctagacgcctctccttc

SEQ ID NO: 118143 - DNA, 38 bp, Artificial Sequence
  primer
gtaaaacgacggccagtctccttgtgcacacacctctg

SEQ ID NO: 118144 - DNA, 21 bp, Artificial Sequence
  primer
ccgagctgaagtctgggatac

SEQ ID NO: 118145 - DNA, 38 bp, Artificial Sequence
  primer
gtaaaacgacggccagttcactgagccgaatgaaactg

SEQ ID NO: 118146 - DNA, 39 bp, Artificial Sequence
  primer
gtaaaacgacggccagtgggcaacagaggccttataatc

SEQ ID NO: 118147 - DNA, 21 bp, Artificial Sequence
  primer
cccaagcctatcccatttagg

SEQ ID NO: 118148 - DNA, 37 bp, Artificial Sequence
  primer
gtaaaacgacggccagtgatcagactggcactcaggc

SEQ ID NO: 118149 - DNA, 21 bp, Artificial Sequence
  primer
tacagctgagacttgaggccc

SEQ ID NO: 118150 - DNA, 38 bp, Artificial Sequence
  primer
gtaaaacgacggccagtgggcctttgagtagactctgg

SEQ ID NO: 118151 - DNA, 21 bp, Artificial Sequence
  primer
gacaccaaccacaaaggtcag

SEQ ID NO: 118152 - DNA, 21 bp, Artificial Sequence
  primer
gctgcagggagatttatgacc

SEQ ID NO: 118153 - DNA, 21 bp, Artificial Sequence
  primer
aatccagacattcgccttgtc

SEQ ID NO: 118154 - DNA, 21 bp, Artificial Sequence
  primer
ttctccttccaagaccacagc

SEQ ID NO: 118155 - DNA, 20 bp, Artificial Sequence
  primer
caggaagaatgaggcgtgag

SEQ ID NO: 118156 - DNA, 21 bp, Artificial Sequence
  primer
agcaagcagagggatcaacag

SEQ ID NO: 118157 - DNA, 21 bp, Artificial Sequence
  primer
aagtctccggaggtaagaggg

SEQ ID NO: 118158 - DNA, 21 bp, Artificial Sequence
  primer
gggtgaaatagcccagtgaag

SEQ ID NO: 118159 - DNA, 38 bp, Artificial Sequence
  primer
gtaaaacgacggccagtcaggtctgcatctgtgcctac

SEQ ID NO: 118160 - DNA, 37 bp, Artificial Sequence
  primer
gtaaaacgacggccagtctgtgcctctcccacatcag

SEQ ID NO: 118161 - DNA, 38 bp, Artificial Sequence
  primer
gtaaaacgacggccagtaagcacagagactcagctccc

SEQ ID NO: 118162 - DNA, 21 bp, Artificial Sequence
  primer
gacaagagtttgctgcacctg

SEQ ID NO: 118163 - DNA, 37 bp, Artificial Sequence
  primer
gtaaaacgacggccagttctagggcccgtggagttag

SEQ ID NO: 118164 - DNA, 38 bp, Artificial Sequence
  primer
gtaaaacgacggccagtcttcagaggaggtgttccagg

SEQ ID NO: 118165 - DNA, 21 bp, Artificial Sequence
  primer
ctctgcttgaaagagcttccc

SEQ ID NO: 118166 - DNA, 21 bp, Artificial Sequence
  primer
atccagacaggtctccatgtg

SEQ ID NO: 118167 - DNA, 38 bp, Artificial Sequence
  primer
gtaaaacgacggccagtcatgccaggatctaagcacac

SEQ ID NO: 118168 - DNA, 38 bp, Artificial Sequence
  primer
gtaaaacgacggccagtgagggtatgagcatttctccc

SEQ ID NO: 118169 - DNA, 38 bp, Artificial Sequence
  primer
gtaaaacgacggccagtccgtaagagaagggtttcagg

SEQ ID NO: 118170 - DNA, 39 bp, Artificial Sequence
  primer
gtaaaacgacggccagttcccatctgggtctctctactg

SEQ ID NO: 118171 - DNA, 21 bp, Artificial Sequence
  primer
gcattcatcaccctcagacac

SEQ ID NO: 118172 - DNA, 38 bp, Artificial Sequence
  primer
gtaaaacgacggccagttcaccagtcagattctgcgtc

SEQ ID NO: 118173 - DNA, 21 bp, Artificial Sequence
  primer
gcagagtttgtgtccaggttc

SEQ ID NO: 118174 - DNA, 21 bp, Artificial Sequence
  primer
atacggacttcacagtgccag

SEQ ID NO: 118175 - DNA, 21 bp, Artificial Sequence
  primer
tcagtggtggtgtgttgtcag

SEQ ID NO: 118176 - DNA, 21 bp, Artificial Sequence
  primer
atggtagcagagggtctgatg

SEQ ID NO: 118177 - DNA, 38 bp, Artificial Sequence
  primer
gtaaaacgacggccagtgggatatccatgttgtccctg

SEQ ID NO: 118178 - DNA, 38 bp, Artificial Sequence
  primer
gtaaaacgacggccagtgagaactgtattccatggccc

SEQ ID NO: 118179 - DNA, 21 bp, Artificial Sequence
  primer
tttgttcttcccttccctgag

SEQ ID NO: 118180 - DNA, 39 bp, Artificial Sequence
  primer
gtaaaacgacggccagtgcagtgagattgtgacagttgc

SEQ ID NO: 118181 - DNA, 38 bp, Artificial Sequence
  primer
gtaaaacgacggccagtctccctgaaagcagaaagtgg

SEQ ID NO: 118182 - DNA, 38 bp, Artificial Sequence
  primer
gtaaaacgacggccagtgggagaaaggaggaggaacag

SEQ ID NO: 118183 - DNA, 38 bp, Artificial Sequence
  primer
gtaaaacgacggccagtcttactgtgtggccttggatg

SEQ ID NO: 118184 - DNA, 21 bp, Artificial Sequence
  primer
ctggactaagagcctccaagg

SEQ ID NO: 118185 - DNA, 20 bp, Artificial Sequence
  primer
gcctaggaggtctggaggag

SEQ ID NO: 118186 - DNA, 21 bp, Artificial Sequence
  primer
gcattccaggtttccagagag

SEQ ID NO: 118187 - DNA, 38 bp, Artificial Sequence
  primer
gtaaaacgacggccagtttgtcacgaactcctgacctc

SEQ ID NO: 118188 - DNA, 20 bp, Artificial Sequence
  primer
aaagatgagcctgttgctcg

SEQ ID NO: 118189 - DNA, 20 bp, Artificial Sequence
  primer
gtggtggcggacacctataa

SEQ ID NO: 118190 - DNA, 39 bp, Artificial Sequence
  primer
gtaaaacgacggccagtcagcagctggaactcactatcc

SEQ ID NO: 118191 - DNA, 23 bp, Artificial Sequence
  primer
gaattgcttattctcaatgtgcc

SEQ ID NO: 118192 - DNA, 25 bp, Artificial Sequence
  primer
tctcttatcactattctggagccaa

SEQ ID NO: 118193 - DNA, 38 bp, Artificial Sequence
  primer
gtaaaacgacggccagtcaagttatcatcccacctcgg

SEQ ID NO: 118194 - DNA, 24 bp, Artificial Sequence
  primer
aaacaccagttccttgtccattag

SEQ ID NO: 118195 - DNA, 44 bp, Artificial Sequence
  primer
gtaaaacgacggccagtaagtcacgatcttaaataattccaatg

SEQ ID NO: 118196 - DNA, 43 bp, Artificial Sequence
  primer
gtaaaacgacggccagtctaaacagaaagcgattctgtacaac

SEQ ID NO: 118197 - DNA, 22 bp, Artificial Sequence
  primer
cgggtagtagacatgcttctgg

SEQ ID NO: 118198 - DNA, 21 bp, Artificial Sequence
  primer
agcttgcagaaggtgatgttc

SEQ ID NO: 118199 - DNA, 21 bp, Artificial Sequence
  primer
atgaatcgtgctcacacacag

SEQ ID NO: 118200 - DNA, 38 bp, Artificial Sequence
  primer
gtaaaacgacggccagtagagtggtgatacgggacagg

SEQ ID NO: 118201 - DNA, 38 bp, Artificial Sequence
  primer
gtaaaacgacggccagtcactggaccaagtctcattgc

SEQ ID NO: 118202 - DNA, 24 bp, Artificial Sequence
  primer
ttgtgtgttatatgaattccaccc

SEQ ID NO: 118203 - DNA, 21 bp, Artificial Sequence
  primer
agaagaatgtctgcacgaggg

SEQ ID NO: 118204 - DNA, 22 bp, Artificial Sequence
  primer
tgatttaggcatgctgtaggag

SEQ ID NO: 118205 - DNA, 25 bp, Artificial Sequence
  primer
cccaaatgttattaagtggacaaat

SEQ ID NO: 118206 - DNA, 43 bp, Artificial Sequence
  primer
gtaaaacgacggccagttcaccttataccacttacaaatgctc

SEQ ID NO: 118207 - DNA, 21 bp, Artificial Sequence
  primer
cttcacctttctgggttgtgg

SEQ ID NO: 118208 - DNA, 23 bp, Artificial Sequence
  primer
ctctacttgtgagtctggcaacc

SEQ ID NO: 118209 - DNA, 41 bp, Artificial Sequence
  primer
gtaaaacgacggccagtcaggatactctatgtgggttgaaa

SEQ ID NO: 118210 - DNA, 39 bp, Artificial Sequence
  primer
gtaaaacgacggccagtccaaacatggacagaattgatg

SEQ ID NO: 118211 - DNA, 20 bp, Artificial Sequence
  primer
cagtgaagtggcgaagtttg

SEQ ID NO: 118212 - DNA, 22 bp, Artificial Sequence
  primer
caccggaacctgactatactgg

SEQ ID NO: 118213 - DNA, 39 bp, Artificial Sequence
  primer
gtaaaacgacggccagttcattcaaccataatgagcacg

SEQ ID NO: 118214 - DNA, 20 bp, Artificial Sequence
  primer
tggaatgtgctaaaccctgc

SEQ ID NO: 118215 - DNA, 40 bp, Artificial Sequence
  primer
gtaaaacgacggccagttgcaatactgagaacaagaaagg

SEQ ID NO: 118216 - DNA, 42 bp, Artificial Sequence
  primer
gtaaaacgacggccagtagtgagttatgcatatccaatcctt

SEQ ID NO: 118217 - DNA, 21 bp, Artificial Sequence
  primer
ggaaacacggtaaggcagaag

SEQ ID NO: 118218 - DNA, 42 bp, Artificial Sequence
  primer
gtaaaacgacggccagttcatgtggatatttgtagtcttggg

SEQ ID NO: 118219 - DNA, 20 bp, Artificial Sequence
  primer
acactggcactcaggcaatc

SEQ ID NO: 118220 - DNA, 22 bp, Artificial Sequence
  primer
cagcatctctgaaatctgctcc

SEQ ID NO: 118221 - DNA, 38 bp, Artificial Sequence
  primer
gtaaaacgacggccagttggtcaccacccactgaatac

SEQ ID NO: 118222 - DNA, 21 bp, Artificial Sequence
  primer
ccagctctgggaaactagctg

SEQ ID NO: 118223 - DNA, 21 bp, Artificial Sequence
  primer
gacacagcagtgattcaaccc

SEQ ID NO: 118224 - DNA, 22 bp, Artificial Sequence
  primer
gctttcatgtactggcagaagg

SEQ ID NO: 118225 - DNA, 23 bp, Artificial Sequence
  primer
ggacagtagccaggagcaatatc

SEQ ID NO: 118226 - DNA, 22 bp, Artificial Sequence
  primer
gccagaggactcttctctctcc

SEQ ID NO: 118227 - DNA, 21 bp, Artificial Sequence
  primer
ttacagacaggagcaagccag

SEQ ID NO: 118228 - DNA, 38 bp, Artificial Sequence
  primer
gtaaaacgacggccagtgcttcggatgtccagatacag

SEQ ID NO: 118229 - DNA, 21 bp, Artificial Sequence
  primer
ctgtgaagtgagaaaggcgtg

SEQ ID NO: 118230 - DNA, 39 bp, Artificial Sequence
  primer
gtaaaacgacggccagttgtaaggaccctaccagctcag

SEQ ID NO: 118231 - DNA, 38 bp, Artificial Sequence
  primer
gtaaaacgacggccagtctcctatctgcagaagcctgg

SEQ ID NO: 118232 - DNA, 38 bp, Artificial Sequence
  primer
gtaaaacgacggccagtctggagccttgagaaatctgg

SEQ ID NO: 118233 - DNA, 21 bp, Artificial Sequence
  primer
caatgtcccactagggcaaag

SEQ ID NO: 118234 - DNA, 21 bp, Artificial Sequence
  primer
tcatatccattccctgcactg

SEQ ID NO: 118235 - DNA, 20 bp, Artificial Sequence
  primer
gagcagtgggcaagcattac

SEQ ID NO: 118236 - DNA, 24 bp, Artificial Sequence
  primer
tcaaagcaagatttaactgtgacc

SEQ ID NO: 118237 - DNA, 21 bp, Artificial Sequence
  primer
caaggttgacaacaaagccct

SEQ ID NO: 118238 - DNA, 38 bp, Artificial Sequence
  primer
gtaaaacgacggccagtacaagacacaggaaggcaatc

SEQ ID NO: 118239 - DNA, 45 bp, Artificial Sequence
  primer
gtaaaacgacggccagtaaccagagggattaagctatactagaaa

SEQ ID NO: 118240 - DNA, 40 bp, Artificial Sequence
  primer
gtaaaacgacggccagttcacaatgcctgatatactgtgc

SEQ ID NO: 118241 - DNA, 40 bp, Artificial Sequence
  primer
gtaaaacgacggccagtccttgttgaatcatacgttctgc

SEQ ID NO: 118242 - DNA, 29 bp, Artificial Sequence
  primer
aaatagttcctgatcactctgaatctaag

SEQ ID NO: 118243 - DNA, 38 bp, Artificial Sequence
  primer
gtaaaacgacggccagtatgaacaggaagaaacgatgg

SEQ ID NO: 118244 - DNA, 21 bp, Artificial Sequence
  primer
aaaggcaatatggctggaatc

SEQ ID NO: 118245 - DNA, 22 bp, Artificial Sequence
  primer
cacataatttctccatctccgc

SEQ ID NO: 118246 - DNA, 39 bp, Artificial Sequence
  primer
gtaaaacgacggccagtaatggcatgaaagttgacagag

SEQ ID NO: 118247 - DNA, 21 bp, Artificial Sequence
  primer
gcacagtctcaggatgtctgc

SEQ ID NO: 118248 - DNA, 39 bp, Artificial Sequence
  primer
gtaaaacgacggccagtcaagggagatattctcaatggg

SEQ ID NO: 118249 - DNA, 37 bp, Artificial Sequence
  primer
gtaaaacgacggccagtatctcttgccctttgcactg

SEQ ID NO: 118250 - DNA, 20 bp, Artificial Sequence
  primer
tcctgaccttgtgatccacc

SEQ ID NO: 118251 - DNA, 41 bp, Artificial Sequence
  primer
gtaaaacgacggccagttgctttaagtacagcacatgcaac

SEQ ID NO: 118252 - DNA, 43 bp, Artificial Sequence
  primer
gtaaaacgacggccagttcagtaagctattgaatcatttgtgc

SEQ ID NO: 118253 - DNA, 41 bp, Artificial Sequence
  primer
gtaaaacgacggccagtgaaggaagcctgtgtcatattagg

SEQ ID NO: 118254 - DNA, 22 bp, Artificial Sequence
  primer
tggtttgagggctaaagtgaag

SEQ ID NO: 118255 - DNA, 41 bp, Artificial Sequence
  primer
gtaaaacgacggccagtgcaacttgttgattaagagatgcg

SEQ ID NO: 118256 - DNA, 38 bp, Artificial Sequence
  primer
gtaaaacgacggccagttgccacctagtggttatgcag

SEQ ID NO: 118257 - DNA, 21 bp, Artificial Sequence
  primer
caatatgccagccagaaagtg

SEQ ID NO: 118258 - DNA, 22 bp, Artificial Sequence
  primer
tcctggctgatcctaagatgtc

SEQ ID NO: 118259 - DNA, 41 bp, Artificial Sequence
  primer
gtaaaacgacggccagtcacagattatattcaaccgtggag

SEQ ID NO: 118260 - DNA, 22 bp, Artificial Sequence
  primer
tctacaaccaaccacatggaag

SEQ ID NO: 118261 - DNA, 39 bp, Artificial Sequence
  primer
gtaaaacgacggccagtgcatattcagtgtttcacagcc

SEQ ID NO: 118262 - DNA, 43 bp, Artificial Sequence
  primer
gtaaaacgacggccagtcaggaagtattcattcaattatcacc

SEQ ID NO: 118263 - DNA, 40 bp, Artificial Sequence
  primer
gtaaaacgacggccagttctctgaaatgtttcattgccac

SEQ ID NO: 118264 - DNA, 22 bp, Artificial Sequence
  primer
gagcaaatttcaaggaggtcag

SEQ ID NO: 118265 - DNA, 39 bp, Artificial Sequence
  primer
gtaaaacgacggccagtcacacaaggctcttcttcttcc

SEQ ID NO: 118266 - DNA, 22 bp, Artificial Sequence
  primer
ttcttctgtagggtggatggag

SEQ ID NO: 118267 - DNA, 38 bp, Artificial Sequence
  primer
gtaaaacgacggccagtttgtcctgacttctttggctg

SEQ ID NO: 118268 - DNA, 18 bp, Artificial Sequence
  primer
ctcagtcaacccctcccc

SEQ ID NO: 118269 - DNA, 21 bp, Artificial Sequence
  primer
tgcaagcatgtttgtctgttc

SEQ ID NO: 118270 - DNA, 20 bp, Artificial Sequence
  primer
ctcctctctgagcccgtttc

SEQ ID NO: 118271 - DNA, 21 bp, Artificial Sequence
  primer
tccaagcctctctagtcccac

SEQ ID NO: 118272 - DNA, 21 bp, Artificial Sequence
  primer
cagcaggcagggtaaactgag

SEQ ID NO: 118273 - DNA, 18 bp, Artificial Sequence
  primer
cagcagggaggaaggcag

SEQ ID NO: 118274 - DNA, 38 bp, Artificial Sequence
  primer
gtaaaacgacggccagtaaatgtttccaaacaggctgg

SEQ ID NO: 118275 - DNA, 37 bp, Artificial Sequence
  primer
gtaaaacgacggccagtaaactggatctcaggcaccc

SEQ ID NO: 118276 - DNA, 38 bp, Artificial Sequence
  primer
gtaaaacgacggccagtgactaccagtgattgggcagg

SEQ ID NO: 118277 - DNA, 20 bp, Artificial Sequence
  primer
ctggctattgcctctggctc

SEQ ID NO: 118278 - DNA, 38 bp, Artificial Sequence
  primer
gtaaaacgacggccagtgaagaaacagatgccagaccc

SEQ ID NO: 118279 - DNA, 21 bp, Artificial Sequence
  primer
caatattgccatggacaccac

SEQ ID NO: 118280 - DNA, 22 bp, Artificial Sequence
  primer
aagtacaatgcacatgtgtggg

SEQ ID NO: 118281 - DNA, 38 bp, Artificial Sequence
  primer
gtaaaacgacggccagttagtgtccaatgtccctgtgc

SEQ ID NO: 118282 - DNA, 20 bp, Artificial Sequence
  primer
agggagggtattaccggagg

SEQ ID NO: 118283 - DNA, 39 bp, Artificial Sequence
  primer
gtaaaacgacggccagttctaacaatgaaccctcgttgg

SEQ ID NO: 118284 - DNA, 38 bp, Artificial Sequence
  primer
gtaaaacgacggccagtattcacaccttggcatccttc

SEQ ID NO: 118285 - DNA, 37 bp, Artificial Sequence
  primer
gtaaaacgacggccagtggcgtggatgtgaaagtgag

SEQ ID NO: 118286 - DNA, 22 bp, Artificial Sequence
  primer
caggcacacaggtactcatttg

SEQ ID NO: 118287 - DNA, 21 bp, Artificial Sequence
  primer
tgggaaagaaccatcaagttc

SEQ ID NO: 118288 - DNA, 21 bp, Artificial Sequence
  primer
tcttgcctaggcttgtggttc

SEQ ID NO: 118289 - DNA, 22 bp, Artificial Sequence
  primer
cactgcatgacagatgttctgg

SEQ ID NO: 118290 - DNA, 21 bp, Artificial Sequence
  primer
gcccatagctgtagctcgatg

SEQ ID NO: 118291 - DNA, 38 bp, Artificial Sequence
  primer
gtaaaacgacggccagtactgctgagaactctgggtcc

SEQ ID NO: 118292 - DNA, 21 bp, Artificial Sequence
  primer
caaactcccaagaggaacagg

SEQ ID NO: 118293 - DNA, 38 bp, Artificial Sequence
  primer
gtaaaacgacggccagtcagaagacttaccctgcctgg

SEQ ID NO: 118294 - DNA, 21 bp, Artificial Sequence
  primer
gcccatcctcctagataaccc

SEQ ID NO: 118295 - DNA, 21 bp, Artificial Sequence
  primer
cttccaactctgagcatggtg

SEQ ID NO: 118296 - DNA, 21 bp, Artificial Sequence
  primer
acaggagatctgggttccatc

SEQ ID NO: 118297 - DNA, 38 bp, Artificial Sequence
  primer
gtaaaacgacggccagtatcaggaacttcaccctttgc

SEQ ID NO: 118298 - DNA, 21 bp, Artificial Sequence
  primer
acaccttcactctcgtccagg

SEQ ID NO: 118299 - DNA, 20 bp, Artificial Sequence
  primer
cgtctgtggctctcaagctc

SEQ ID NO: 118300 - DNA, 20 bp, Artificial Sequence
  primer
tctacaccacgccgctagac

SEQ ID NO: 118301 - DNA, 21 bp, Artificial Sequence
  primer
aaaggtgtgttcagggaaagc

SEQ ID NO: 118302 - DNA, 44 bp, Artificial Sequence
  primer
gtaaaacgacggccagtaaagtgaatgatctttagactgaaatg

SEQ ID NO: 118303 - DNA, 38 bp, Artificial Sequence
  primer
gtaaaacgacggccagtgtgagacacaatgcccacaac

SEQ ID NO: 118304 - DNA, 26 bp, Artificial Sequence
  primer
tcacagtgtttacacaattagctcac

SEQ ID NO: 118305 - DNA, 21 bp, Artificial Sequence
  primer
aagtgcttgggacatttctgg

SEQ ID NO: 118306 - DNA, 21 bp, Artificial Sequence
  primer
tcaggagtggaaagggctaac

SEQ ID NO: 118307 - DNA, 43 bp, Artificial Sequence
  primer
gtaaaacgacggccagtggaagaacacttcagaatcagtgaac

SEQ ID NO: 118308 - DNA, 36 bp, Artificial Sequence
  primer
gtaaaacgacggccagtaaagcagaaggcgggagag

SEQ ID NO: 118309 - DNA, 38 bp, Artificial Sequence
  primer
gtaaaacgacggccagtcaggctgtcatcaggtttagc

SEQ ID NO: 118310 - DNA, 22 bp, Artificial Sequence
  primer
ccaacaataatggtttggatgg

SEQ ID NO: 118311 - DNA, 40 bp, Artificial Sequence
  primer
gtaaaacgacggccagtaaagatattcagtttgccactgc

SEQ ID NO: 118312 - DNA, 21 bp, Artificial Sequence
  primer
cctgttcctctgtcttcaccc

SEQ ID NO: 118313 - DNA, 22 bp, Artificial Sequence
  primer
cttcccatctgagcagtgaatc

SEQ ID NO: 118314 - DNA, 25 bp, Artificial Sequence
  primer
tgaatgcaggaaaggagtatgtatg

SEQ ID NO: 118315 - DNA, 23 bp, Artificial Sequence
  primer
aactgttccaagagtggagtcac

SEQ ID NO: 118316 - DNA, 36 bp, Artificial Sequence
  primer
gtaaaacgacggccagtaaacagccagggctgagag

SEQ ID NO: 118317 - DNA, 39 bp, Artificial Sequence
  primer
gtaaaacgacggccagttggcactgcaatttagtcaaag

SEQ ID NO: 118318 - DNA, 21 bp, Artificial Sequence
  primer
gtttcctctcctcacagaggc

SEQ ID NO: 118319 - DNA, 21 bp, Artificial Sequence
  primer
aagctcagggctaacaggatg

SEQ ID NO: 118320 - DNA, 38 bp, Artificial Sequence
  primer
gtaaaacgacggccagtaataagccactttgggtcagg

SEQ ID NO: 118321 - DNA, 21 bp, Artificial Sequence
  primer
aagggagtgtggacgactttg

SEQ ID NO: 118322 - DNA, 38 bp, Artificial Sequence
  primer
gtaaaacgacggccagtcctgacctagtgcctctgtcc

SEQ ID NO: 118323 - DNA, 38 bp, Artificial Sequence
  primer
gtaaaacgacggccagtgaaagagagaggaaggacccg

SEQ ID NO: 118324 - DNA, 21 bp, Artificial Sequence
  primer
acctcccacaccagcatttag

SEQ ID NO: 118325 - DNA, 20 bp, Artificial Sequence
  primer
gaggtgtctgggtctgggag

SEQ ID NO: 118326 - DNA, 37 bp, Artificial Sequence
  primer
gtaaaacgacggccagttgcacaggtccatcctgaag

SEQ ID NO: 118327 - DNA, 21 bp, Artificial Sequence
  primer
gagagacgagcatacaggcag

SEQ ID NO: 118328 - DNA, 21 bp, Artificial Sequence
  primer
gctgctgtgagtgaccatgtg

SEQ ID NO: 118329 - DNA, 37 bp, Artificial Sequence
  primer
gtaaaacgacggccagtgacaaggtgacaaggcgaag

SEQ ID NO: 118330 - DNA, 38 bp, Artificial Sequence
  primer
gtaaaacgacggccagtgtgaagatccctcacacaccc

SEQ ID NO: 118331 - DNA, 35 bp, Artificial Sequence
  primer
gtaaaacgacggccagtctctccctgtgggaagcc

SEQ ID NO: 118332 - DNA, 38 bp, Artificial Sequence
  primer
gtaaaacgacggccagtcactgcagaaagccacttcag

SEQ ID NO: 118333 - DNA, 20 bp, Artificial Sequence
  primer
ctggctccctgctgtctatg

SEQ ID NO: 118334 - DNA, 37 bp, Artificial Sequence
  primer
gtaaaacgacggccagtaagactgagcatggtggagg

SEQ ID NO: 118335 - DNA, 38 bp, Artificial Sequence
  primer
gtaaaacgacggccagtctcagacaccagcaactcctc

SEQ ID NO: 118336 - DNA, 20 bp, Artificial Sequence
  primer
gatgggcagaaggacagagg

SEQ ID NO: 118337 - DNA, 19 bp, Artificial Sequence
  primer
cgtccatggtgacgttctg

SEQ ID NO: 118338 - DNA, 38 bp, Artificial Sequence
  primer
gtaaaacgacggccagtgtgccatcttctctaccaggc

SEQ ID NO: 118339 - DNA, 20 bp, Artificial Sequence
  primer
gggttccctggaatctgaag

SEQ ID NO: 118340 - DNA, 21 bp, Artificial Sequence
  primer
aagcacctgcctagcatgaag

SEQ ID NO: 118341 - DNA, 24 bp, Artificial Sequence
  primer
aacactatgagcaagcagatgttc

SEQ ID NO: 118342 - DNA, 20 bp, Artificial Sequence
  primer
gaggtaagtggcagaagccc

SEQ ID NO: 118343 - DNA, 25 bp, Artificial Sequence
  primer
tctttaggtttgtaagttctggcac

SEQ ID NO: 118344 - DNA, 38 bp, Artificial Sequence
  primer
gtaaaacgacggccagtgactccacgccaaagtagctc

SEQ ID NO: 118345 - DNA, 21 bp, Artificial Sequence
  primer
agactccgagcaggttagagg

SEQ ID NO: 118346 - DNA, 25 bp, Artificial Sequence
  primer
tcatttgctatgatagttcttggaa

SEQ ID NO: 118347 - DNA, 21 bp, Artificial Sequence
  primer
taatggcttccttcaatccag

SEQ ID NO: 118348 - DNA, 18 bp, Artificial Sequence
  primer
aggtgtgagccaccatgc

SEQ ID NO: 118349 - DNA, 45 bp, Artificial Sequence
  primer
gtaaaacgacggccagtttctttatccaaatattaggtcacaatc

SEQ ID NO: 118350 - DNA, 27 bp, Artificial Sequence
  primer
cataacatcaactgaaatttctgaatc

SEQ ID NO: 118351 - DNA, 38 bp, Artificial Sequence
  primer
gtaaaacgacggccagttgggaggtgattaacgggtag

SEQ ID NO: 118352 - DNA, 40 bp, Artificial Sequence
  primer
gtaaaacgacggccagtcaatcaagttcgtatccaaggtg

SEQ ID NO: 118353 - DNA, 20 bp, Artificial Sequence
  primer
aggcctttctagtggatgcc

SEQ ID NO: 118354 - DNA, 21 bp, Artificial Sequence
  primer
atggagacttgccatggattc

SEQ ID NO: 118355 - DNA, 38 bp, Artificial Sequence
  primer
gtaaaacgacggccagttttgaggctgcagtaagcaat

SEQ ID NO: 118356 - DNA, 38 bp, Artificial Sequence
  primer
gtaaaacgacggccagtatgtctgctgaacaagcacag

SEQ ID NO: 118357 - DNA, 38 bp, Artificial Sequence
  primer
gtaaaacgacggccagtgctgaagttcctgcatttgtg

SEQ ID NO: 118358 - DNA, 19 bp, Artificial Sequence
  primer
gtgcttgccgttctctgtg

SEQ ID NO: 118359 - DNA, 37 bp, Artificial Sequence
  primer
gtaaaacgacggccagtttcattcgggaacattcgtg

SEQ ID NO: 118360 - DNA, 20 bp, Artificial Sequence
  primer
ccacttctccaggaactccc

SEQ ID NO: 118361 - DNA, 21 bp, Artificial Sequence
  primer
gtggctttgagagaatccctg

SEQ ID NO: 118362 - DNA, 21 bp, Artificial Sequence
  primer
tggtagaggagcaggtgcttg

SEQ ID NO: 118363 - DNA, 38 bp, Artificial Sequence
  primer
gtaaaacgacggccagtgcaggactgtctgagccaaag

SEQ ID NO: 118364 - DNA, 38 bp, Artificial Sequence
  primer
gtaaaacgacggccagtagcccattataccctctgctg

SEQ ID NO: 118365 - DNA, 37 bp, Artificial Sequence
  primer
gtaaaacgacggccagttgaatgcactagggacaggg

SEQ ID NO: 118366 - DNA, 20 bp, Artificial Sequence
  primer
cttcactggccatggagttg

SEQ ID NO: 118367 - DNA, 21 bp, Artificial Sequence
  primer
gtgcctgccaggaaatgtaag

SEQ ID NO: 118368 - DNA, 21 bp, Artificial Sequence
  primer
tccaggaggttagatgggttg

SEQ ID NO: 118369 - DNA, 44 bp, Artificial Sequence
  primer
gtaaaacgacggccagtggaattaatgaataaatactgcaatca

SEQ ID NO: 118370 - DNA, 27 bp, Artificial Sequence
  primer
tttcagaccagataaatttaacaacac

SEQ ID NO: 118371 - DNA, 44 bp, Artificial Sequence
  primer
gtaaaacgacggccagtggctttctaataaatgtgaattgtatc

SEQ ID NO: 118372 - DNA, 44 bp, Artificial Sequence
  primer
gtaaaacgacggccagtatgtgtacaatgagaccttgatcttag

SEQ ID NO: 118373 - DNA, 38 bp, Artificial Sequence
  primer
gtaaaacgacggccagtggctcccttgacttgaaacac

SEQ ID NO: 118374 - DNA, 36 bp, Artificial Sequence
  primer
gtaaaacgacggccagtctggatggcctgatcaatg

SEQ ID NO: 118375 - DNA, 35 bp, Artificial Sequence
  primer
gtaaaacgacggccagtaagtgctggcaaagcgtg

SEQ ID NO: 118376 - DNA, 21 bp, Artificial Sequence
  primer
atgctttgcactcaaggaagg

SEQ ID NO: 118377 - DNA, 38 bp, Artificial Sequence
  primer
gtaaaacgacggccagtggttcacctcaaataaagcgg

SEQ ID NO: 118378 - DNA, 38 bp, Artificial Sequence
  primer
gtaaaacgacggccagtagagttagagtcccagcccac

SEQ ID NO: 118379 - DNA, 21 bp, Artificial Sequence
  primer
tggaaatgtatgtctttcggg

SEQ ID NO: 118380 - DNA, 21 bp, Artificial Sequence
  primer
catatggctttcccaggaatc

SEQ ID NO: 118381 - DNA, 22 bp, Artificial Sequence
  primer
tgctagattgcagatacctggg

SEQ ID NO: 118382 - DNA, 22 bp, Artificial Sequence
  primer
ggtggagtggaagaaagaaacc

SEQ ID NO: 118383 - DNA, 38 bp, Artificial Sequence
  primer
gtaaaacgacggccagttctgtagactgaagctggccc

SEQ ID NO: 118384 - DNA, 36 bp, Artificial Sequence
  primer
gtaaaacgacggccagtacagaacgcgccattcaac

SEQ ID NO: 118385 - DNA, 21 bp, Artificial Sequence
  primer
agtaagcacagtgttgcctgg

SEQ ID NO: 118386 - DNA, 21 bp, Artificial Sequence
  primer
aaatgattcagtggaaagggc

SEQ ID NO: 118387 - DNA, 38 bp, Artificial Sequence
  primer
gtaaaacgacggccagtacccgaatgatagctaggacc

SEQ ID NO: 118388 - DNA, 19 bp, Artificial Sequence
  primer
ctcagaccgagaagccctg

SEQ ID NO: 118389 - DNA, 20 bp, Artificial Sequence
  primer
gtgatgcatctgcttcaggc

SEQ ID NO: 118390 - DNA, 38 bp, Artificial Sequence
  primer
gtaaaacgacggccagttcagtatttgcaaggtcggtg

SEQ ID NO: 118391 - DNA, 20 bp, Artificial Sequence
  primer
ctgcgggaggaaagagacag

SEQ ID NO: 118392 - DNA, 19 bp, Artificial Sequence
  primer
agagaagttgcccagccct

SEQ ID NO: 118393 - DNA, 21 bp, Artificial Sequence
  primer
gtgccatcgacttattgatcg

SEQ ID NO: 118394 - DNA, 38 bp, Artificial Sequence
  primer
gtaaaacgacggccagtaccaatcgcttcattcattcc

SEQ ID NO: 118395 - DNA, 38 bp, Artificial Sequence
  primer
gtaaaacgacggccagtatggagcaactggaaaccaag

SEQ ID NO: 118396 - DNA, 37 bp, Artificial Sequence
  primer
gtaaaacgacggccagtatgcaccaattccagtttgc

SEQ ID NO: 118397 - DNA, 20 bp, Artificial Sequence
  primer
gtgcaggaggtctgaccaag

SEQ ID NO: 118398 - DNA, 36 bp, Artificial Sequence
  primer
gtaaaacgacggccagtgtgttccgtagccacccac

SEQ ID NO: 118399 - DNA, 21 bp, Artificial Sequence
  primer
cctctctgtacagtcctcccg

SEQ ID NO: 118400 - DNA, 19 bp, Artificial Sequence
  primer
cagctcctcacacctgtcg

SEQ ID NO: 118401 - DNA, 21 bp, Artificial Sequence
  primer
tacgtgaacctagcgtgaggg

SEQ ID NO: 118402 - DNA, 19 bp, Artificial Sequence
  primer
tggacacgtgcctcttcag

SEQ ID NO: 118403 - DNA, 38 bp, Artificial Sequence
  primer
gtaaaacgacggccagtatccaagcaatgcacacactc

SEQ ID NO: 118404 - DNA, 38 bp, Artificial Sequence
  primer
gtaaaacgacggccagtaggaatctggtcctttctggg

SEQ ID NO: 118405 - DNA, 21 bp, Artificial Sequence
  primer
aggctgtttgcatgttgattc

SEQ ID NO: 118406 - DNA, 21 bp, Artificial Sequence
  primer
tttgaacaatgacgaccaagg

SEQ ID NO: 118407 - DNA, 38 bp, Artificial Sequence
  primer
gtaaaacgacggccagtgtaatcctttcagcctcctgc

SEQ ID NO: 118408 - DNA, 39 bp, Artificial Sequence
  primer
gtaaaacgacggccagtaagtgcagagaaatctggaacg

SEQ ID NO: 118409 - DNA, 21 bp, Artificial Sequence
  primer
ctgcgtttctgtcatttcacg

SEQ ID NO: 118410 - DNA, 38 bp, Artificial Sequence
  primer
gtaaaacgacggccagttacttccgagttggagatggg

SEQ ID NO: 118411 - DNA, 20 bp, Artificial Sequence
  primer
gggaggatgtgatttcccac

SEQ ID NO: 118412 - DNA, 21 bp, Artificial Sequence
  primer
cctagaattccataggcctgg

SEQ ID NO: 118413 - DNA, 20 bp, Artificial Sequence
  primer
gactggaggacaggtgggag

SEQ ID NO: 118414 - DNA, 21 bp, Artificial Sequence
  primer
cagcacacctgctagtcttgg

SEQ ID NO: 118415 - DNA, 37 bp, Artificial Sequence
  primer
gtaaaacgacggccagtcagcaaagcaaggactccag

SEQ ID NO: 118416 - DNA, 20 bp, Artificial Sequence
  primer
acaatcacggtcactcccag

SEQ ID NO: 118417 - DNA, 38 bp, Artificial Sequence
  primer
gtaaaacgacggccagtgtaattgaccctcttggcgag

SEQ ID NO: 118418 - DNA, 22 bp, Artificial Sequence
  primer
aagaagccgctctctctactcc

SEQ ID NO: 118419 - DNA, 21 bp, Artificial Sequence
  primer
ttgtcctctgacaactggctc

SEQ ID NO: 118420 - DNA, 21 bp, Artificial Sequence
  primer
aagtcagaccacggcaatctc

SEQ ID NO: 118421 - DNA, 38 bp, Artificial Sequence
  primer
gtaaaacgacggccagtggtccacatcaaccaagaagg

SEQ ID NO: 118422 - DNA, 20 bp, Artificial Sequence
  primer
gtggaggtgctatgtctgcc

SEQ ID NO: 118423 - DNA, 21 bp, Artificial Sequence
  primer
aggacgaacagaactgaaggg

SEQ ID NO: 118424 - DNA, 21 bp, Artificial Sequence
  primer
aagggatcaaagtgtgtcgtg

SEQ ID NO: 118425 - DNA, 38 bp, Artificial Sequence
  primer
gtaaaacgacggccagttaggtaaacatgcaagccgat

SEQ ID NO: 118426 - DNA, 38 bp, Artificial Sequence
  primer
gtaaaacgacggccagtagctgtagaatgaagcggagg

SEQ ID NO: 118427 - DNA, 37 bp, Artificial Sequence
  primer
gtaaaacgacggccagtgatcccacccacagggatac

SEQ ID NO: 118428 - DNA, 21 bp, Artificial Sequence
  primer
gctttgtccctccaaactgtg

SEQ ID NO: 118429 - DNA, 18 bp, Artificial Sequence
  primer
gggaatcagaactccggc

SEQ ID NO: 118430 - DNA, 38 bp, Artificial Sequence
  primer
gtaaaacgacggccagtattcccacgcaaccagtaatc

SEQ ID NO: 118431 - DNA, 22 bp, Artificial Sequence
  primer
tggtcacaacctactccaaagg

SEQ ID NO: 118432 - DNA, 38 bp, Artificial Sequence
  primer
gtaaaacgacggccagttgaaacaggttgttcaggagc

SEQ ID NO: 118433 - DNA, 21 bp, Artificial Sequence
  primer
ggtctcgctacgttacccaag

SEQ ID NO: 118434 - DNA, 21 bp, Artificial Sequence
  primer
aaagggaaggaacctggagac

SEQ ID NO: 118435 - DNA, 38 bp, Artificial Sequence
  primer
gtaaaacgacggccagtaaagtgatgaggctgagggtg

SEQ ID NO: 118436 - DNA, 38 bp, Artificial Sequence
  primer
gtaaaacgacggccagtgacctagcgtggtcactcctc

SEQ ID NO: 118437 - DNA, 20 bp, Artificial Sequence
  primer
gccagagagaacaaagcctg

SEQ ID NO: 118438 - DNA, 38 bp, Artificial Sequence
  primer
gtaaaacgacggccagtagggctctggtctttgaagtg

SEQ ID NO: 118439 - DNA, 21 bp, Artificial Sequence
  primer
attggctactggtgaggatcg

SEQ ID NO: 118440 - DNA, 38 bp, Artificial Sequence
  primer
gtaaaacgacggccagtggagtaggagccagaaatccc

SEQ ID NO: 118441 - DNA, 37 bp, Artificial Sequence
  primer
gtaaaacgacggccagtcagcttctgggcggaaatac

SEQ ID NO: 118442 - DNA, 18 bp, Artificial Sequence
  primer
acacccgagaccgagacc

SEQ ID NO: 118443 - DNA, 19 bp, Artificial Sequence
  primer
ctccggaaggcttctcagc

SEQ ID NO: 118444 - DNA, 21 bp, Artificial Sequence
  primer
ctccctccttagcctcagagc

SEQ ID NO: 118445 - DNA, 37 bp, Artificial Sequence
  primer
gtaaaacgacggccagtgccaagctcctcctttaagc

SEQ ID NO: 118446 - DNA, 38 bp, Artificial Sequence
  primer
gtaaaacgacggccagtagtggtaccagaaggctggag

SEQ ID NO: 118447 - DNA, 38 bp, Artificial Sequence
  primer
gtaaaacgacggccagtctctggaaataacccaggctc

SEQ ID NO: 118448 - DNA, 21 bp, Artificial Sequence
  primer
gtttcacccatcaggtcactg

SEQ ID NO: 118449 - DNA, 40 bp, Artificial Sequence
  primer
gtaaaacgacggccagtaacaaccatccttcctttgtcac

SEQ ID NO: 118450 - DNA, 21 bp, Artificial Sequence
  primer
cctgagtcagactgtcatccc

SEQ ID NO: 118451 - DNA, 38 bp, Artificial Sequence
  primer
gtaaaacgacggccagttgtgctcccatagacaccttg

SEQ ID NO: 118452 - DNA, 21 bp, Artificial Sequence
  primer
ctcgaggaagtgaagcctctg

SEQ ID NO: 118453 - DNA, 22 bp, Artificial Sequence
  primer
gcctgggtaacaagaacgaaac

SEQ ID NO: 118454 - DNA, 20 bp, Artificial Sequence
  primer
cacaccacatcatccctgtg

SEQ ID NO: 118455 - DNA, 21 bp, Artificial Sequence
  primer
ggataacaagggcatccactc

SEQ ID NO: 118456 - DNA, 38 bp, Artificial Sequence
  primer
gtaaaacgacggccagtctgacatctgcaacctgaagc

SEQ ID NO: 118457 - DNA, 21 bp, Artificial Sequence
  primer
cataatccatcatgcacagcc

SEQ ID NO: 118458 - DNA, 20 bp, Artificial Sequence
  primer
ctggttgtccgtgatgatcc

SEQ ID NO: 118459 - DNA, 21 bp, Artificial Sequence
  primer
ggctctctgggctcttgaaac

SEQ ID NO: 118460 - DNA, 19 bp, Artificial Sequence
  primer
ccagtgtgaggaagcaggg

SEQ ID NO: 118461 - DNA, 21 bp, Artificial Sequence
  primer
cttcagagagccacactcctg

SEQ ID NO: 118462 - DNA, 38 bp, Artificial Sequence
  primer
gtaaaacgacggccagtggttgggaagagaaagcaaag

SEQ ID NO: 118463 - DNA, 21 bp, Artificial Sequence
  primer
tcatggacactgcctatttgc

SEQ ID NO: 118464 - DNA, 21 bp, Artificial Sequence
  primer
gctactgccttcaacacctcc

SEQ ID NO: 118465 - DNA, 21 bp, Artificial Sequence
  primer
cacctgcaatgtcaaggaaag

SEQ ID NO: 118466 - DNA, 38 bp, Artificial Sequence
  primer
gtaaaacgacggccagtacaggataggctcaccttccc

SEQ ID NO: 118467 - DNA, 21 bp, Artificial Sequence
  primer
gaatgaggaaaggactggctg

SEQ ID NO: 118468 - DNA, 38 bp, Artificial Sequence
  primer
gtaaaacgacggccagtttggaaggcccatagcattac

SEQ ID NO: 118469 - DNA, 21 bp, Artificial Sequence
  primer
atggtgcctgtcacactgaag

SEQ ID NO: 118470 - DNA, 35 bp, Artificial Sequence
  primer
gtaaaacgacggccagtcatgattcacccgccttg

SEQ ID NO: 118471 - DNA, 21 bp, Artificial Sequence
  primer
atggcatctgcctgaagagac

SEQ ID NO: 118472 - DNA, 21 bp, Artificial Sequence
  primer
acctctttcccagtgcttgag

SEQ ID NO: 118473 - DNA, 38 bp, Artificial Sequence
  primer
gtaaaacgacggccagtctacctcctgcaagggtatgg

SEQ ID NO: 118474 - DNA, 39 bp, Artificial Sequence
  primer
gtaaaacgacggccagtggaatagcaagtgaggacatgg

SEQ ID NO: 118475 - DNA, 37 bp, Artificial Sequence
  primer
gtaaaacgacggccagtcctggtccacagacttcagg

SEQ ID NO: 118476 - DNA, 21 bp, Artificial Sequence
  primer
ctcagccatgctttgtaagcc

SEQ ID NO: 118477 - DNA, 20 bp, Artificial Sequence
  primer
ctcttcaggctgcctttgtg

SEQ ID NO: 118478 - DNA, 22 bp, Artificial Sequence
  primer
aagagcaaacagctttgtcagg

SEQ ID NO: 118479 - DNA, 21 bp, Artificial Sequence
  primer
gtacttgagggccagcatagc

SEQ ID NO: 118480 - DNA, 21 bp, Artificial Sequence
  primer
gatgacctctagcatgggtcg

SEQ ID NO: 118481 - DNA, 37 bp, Artificial Sequence
  primer
gtaaaacgacggccagtcctcctctcctctcacgcac

SEQ ID NO: 118482 - DNA, 38 bp, Artificial Sequence
  primer
gtaaaacgacggccagtccatgaacaccctgtatgctg

SEQ ID NO: 118483 - DNA, 20 bp, Artificial Sequence
  primer
gagctgacatctcgccgtag

SEQ ID NO: 118484 - DNA, 21 bp, Artificial Sequence
  primer
agatgaccctgtagtcccagc

SEQ ID NO: 118485 - DNA, 36 bp, Artificial Sequence
  primer
gtaaaacgacggccagtccacaaagaagggacaggg

SEQ ID NO: 118486 - DNA, 19 bp, Artificial Sequence
  primer
gaggaggcctgtggaggag

SEQ ID NO: 118487 - DNA, 20 bp, Artificial Sequence
  primer
caccctacccaccaaggaag

SEQ ID NO: 118488 - DNA, 38 bp, Artificial Sequence
  primer
gtaaaacgacggccagtttctcatggacctcaaactgc

SEQ ID NO: 118489 - DNA, 20 bp, Artificial Sequence
  primer
atggctgtgagacgatttgc

SEQ ID NO: 118490 - DNA, 38 bp, Artificial Sequence
  primer
gtaaaacgacggccagtaagtcagggtcgtacagggtg

SEQ ID NO: 118491 - DNA, 38 bp, Artificial Sequence
  primer
gtaaaacgacggccagtcagctgtcctgactcctgaac

SEQ ID NO: 118492 - DNA, 36 bp, Artificial Sequence
  primer
gtaaaacgacggccagtcaggaagcggctgtaggag

SEQ ID NO: 118493 - DNA, 21 bp, Artificial Sequence
  primer
cctactctttcctcccaaccc

SEQ ID NO: 118494 - DNA, 38 bp, Artificial Sequence
  primer
gtaaaacgacggccagtagctctgtccctcatctggag

SEQ ID NO: 118495 - DNA, 38 bp, Artificial Sequence
  primer
gtaaaacgacggccagtggacaggtgatgacagacagg

SEQ ID NO: 118496 - DNA, 38 bp, Artificial Sequence
  primer
gtaaaacgacggccagttcctcaaactgggacacactg

SEQ ID NO: 118497 - DNA, 36 bp, Artificial Sequence
  primer
gtaaaacgacggccagtaaagtccagcctcaccctg

SEQ ID NO: 118498 - DNA, 23 bp, Artificial Sequence
  primer
ccttgaaagtgaagacattggac

SEQ ID NO: 118499 - DNA, 21 bp, Artificial Sequence
  primer
agttgccttctggagaacagg

SEQ ID NO: 118500 - DNA, 22 bp, Artificial Sequence
  primer
tcctggaaagtagaagcgtttg

SEQ ID NO: 118501 - DNA, 21 bp, Artificial Sequence
  primer
gaaactcagtcagagcctggg

SEQ ID NO: 118502 - DNA, 19 bp, Artificial Sequence
  primer
cccagggacccaaagtctc

SEQ ID NO: 118503 - DNA, 20 bp, Artificial Sequence
  primer
cttggtagggtcttggaggc

SEQ ID NO: 118504 - DNA, 38 bp, Artificial Sequence
  primer
gtaaaacgacggccagtgtgaccctaatgatccaccag

SEQ ID NO: 118505 - DNA, 37 bp, Artificial Sequence
  primer
gtaaaacgacggccagtgtcaggcatcttgtgatggg

SEQ ID NO: 118506 - DNA, 21 bp, Artificial Sequence
  primer
gttaggcaggactgctgagtg

SEQ ID NO: 118507 - DNA, 18 bp, Artificial Sequence
  primer
gggacttcccgagcacag

SEQ ID NO: 118508 - DNA, 36 bp, Artificial Sequence
  primer
gtaaaacgacggccagtagagtacgagcgcctcctg

SEQ ID NO: 118509 - DNA, 36 bp, Artificial Sequence
  primer
gtaaaacgacggccagtcacgtgttcatcgagacgg

SEQ ID NO: 118510 - DNA, 21 bp, Artificial Sequence
  primer
cacaggcctatcgaattaggg

SEQ ID NO: 118511 - DNA, 21 bp, Artificial Sequence
  primer
acgttccactttcacccagtc

SEQ ID NO: 118512 - DNA, 38 bp, Artificial Sequence
  primer
gtaaaacgacggccagtcagaagcactgctccactgtc

SEQ ID NO: 118513 - DNA, 37 bp, Artificial Sequence
  primer
gtaaaacgacggccagtaggaggatagccgcagactc

SEQ ID NO: 118514 - DNA, 21 bp, Artificial Sequence
  primer
tgaatgaccaccagaaccaac

SEQ ID NO: 118515 - DNA, 21 bp, Artificial Sequence
  primer
ggcaagtcttactttgtcggg

SEQ ID NO: 118516 - DNA, 19 bp, Artificial Sequence
  primer
cagcactgagctaccacgg

SEQ ID NO: 118517 - DNA, 21 bp, Artificial Sequence
  primer
agtgaaagagatcagggaccg

SEQ ID NO: 118518 - DNA, 39 bp, Artificial Sequence
  primer
gtaaaacgacggccagtgccaatcaggataaagcatgag

SEQ ID NO: 118519 - DNA, 38 bp, Artificial Sequence
  primer
gtaaaacgacggccagttagaaacaactgtcatcgccc

SEQ ID NO: 118520 - DNA, 21 bp, Artificial Sequence
  primer
attctgtcaccacagcaagga

SEQ ID NO: 118521 - DNA, 39 bp, Artificial Sequence
  primer
gtaaaacgacggccagtcaagagccgttcgcagatatac

SEQ ID NO: 118522 - DNA, 21 bp, Artificial Sequence
  primer
ttccttagctttccttccagg

SEQ ID NO: 118523 - DNA, 21 bp, Artificial Sequence
  primer
gaatccttcaacgcactgagc

SEQ ID NO: 118524 - DNA, 21 bp, Artificial Sequence
  primer
aacctacctgcacagaacacg

SEQ ID NO: 118525 - DNA, 22 bp, Artificial Sequence
  primer
ctgagtctctgcattcacatcg

SEQ ID NO: 118526 - DNA, 21 bp, Artificial Sequence
  primer
ctctccttagatgctggtggg

SEQ ID NO: 118527 - DNA, 21 bp, Artificial Sequence
  primer
cttctcagaggagcagggttc

SEQ ID NO: 118528 - DNA, 20 bp, Artificial Sequence
  primer
ctctgggagaatggatgtgc

SEQ ID NO: 118529 - DNA, 21 bp, Artificial Sequence
  primer
agctctgaaagcactgtgtcc

SEQ ID NO: 118530 - DNA, 21 bp, Artificial Sequence
  primer
cactatggctctcctcaagcc

SEQ ID NO: 118531 - DNA, 38 bp, Artificial Sequence
  primer
gtaaaacgacggccagtcaatctggccacaaatcttcc

SEQ ID NO: 118532 - DNA, 18 bp, Artificial Sequence
  primer
accgacggccctacaatc

SEQ ID NO: 118533 - DNA, 38 bp, Artificial Sequence
  primer
gtaaaacgacggccagttagcgttaggaccaaaccacc

SEQ ID NO: 118534 - DNA, 21 bp, Artificial Sequence
  primer
acagtttccagttgctctggg

SEQ ID NO: 118535 - DNA, 36 bp, Artificial Sequence
  primer
gtaaaacgacggccagtatcatcgcatgcactggag

SEQ ID NO: 118536 - DNA, 21 bp, Artificial Sequence
  primer
tcacctgttgaagctgagagg

SEQ ID NO: 118537 - DNA, 36 bp, Artificial Sequence
  primer
gtaaaacgacggccagtcggtctgggatctggtctg

SEQ ID NO: 118538 - DNA, 37 bp, Artificial Sequence
  primer
gtaaaacgacggccagttcccatgaccgtcttcactc

SEQ ID NO: 118539 - DNA, 38 bp, Artificial Sequence
  primer
gtaaaacgacggccagtctctttagcaccatgaggcag

SEQ ID NO: 118540 - DNA, 38 bp, Artificial Sequence
  primer
gtaaaacgacggccagttggtcagatatgagctgtggg

SEQ ID NO: 118541 - DNA, 20 bp, Artificial Sequence
  primer
acgagggagacaactggatg

SEQ ID NO: 118542 - DNA, 21 bp, Artificial Sequence
  primer
attcatttggagccagaaagc

SEQ ID NO: 118543 - DNA, 21 bp, Artificial Sequence
  primer
ctgatcccgttaaaggtgagg

SEQ ID NO: 118544 - DNA, 38 bp, Artificial Sequence
  primer
gtaaaacgacggccagtattggagaggaactgcacacc

SEQ ID NO: 118545 - DNA, 21 bp, Artificial Sequence
  primer
gaaagccaaacggagaatcac

SEQ ID NO: 118546 - DNA, 21 bp, Artificial Sequence
  primer
atgctgagaggagtcagggtg

SEQ ID NO: 118547 - DNA, 38 bp, Artificial Sequence
  primer
gtaaaacgacggccagtctcttccctcctttccacctg

SEQ ID NO: 118548 - DNA, 21 bp, Artificial Sequence
  primer
accttccttctgttcattggg

SEQ ID NO: 118549 - DNA, 21 bp, Artificial Sequence
  primer
tgaagaaacaaaggcttggag

SEQ ID NO: 118550 - DNA, 21 bp, Artificial Sequence
  primer
acccaggcctagtgctctaac

SEQ ID NO: 118551 - DNA, 20 bp, Artificial Sequence
  primer
gtcagtagctggcaggttgc

SEQ ID NO: 118552 - DNA, 38 bp, Artificial Sequence
  primer
gtaaaacgacggccagtgacagccacaagcagatgaac

SEQ ID NO: 118553 - DNA, 38 bp, Artificial Sequence
  primer
gtaaaacgacggccagtttagggtctttgggcatcttc

SEQ ID NO: 118554 - DNA, 21 bp, Artificial Sequence
  primer
taaccaaaggctggtttgagg

SEQ ID NO: 118555 - DNA, 21 bp, Artificial Sequence
  primer
gaggacaccaaatccaagagg

SEQ ID NO: 118556 - DNA, 22 bp, Artificial Sequence
  primer
catggagatgttctccctctct

SEQ ID NO: 118557 - DNA, 29 bp, Artificial Sequence
  primer
gagctagaactataaagccacagtctatt

SEQ ID NO: 118558 - DNA, 21 bp, Artificial Sequence
  primer
gctttctgtctcctcctctgc

SEQ ID NO: 118559 - DNA, 21 bp, Artificial Sequence
  primer
cagcggtggtatctgggtaag

SEQ ID NO: 118560 - DNA, 35 bp, Artificial Sequence
  primer
gtaaaacgacggccagttgatctggccacctcagc

SEQ ID NO: 118561 - DNA, 38 bp, Artificial Sequence
  primer
gtaaaacgacggccagtttggtgtccttacagcaaagc

SEQ ID NO: 118562 - DNA, 24 bp, Artificial Sequence
  primer
aagaacctggaatcattgagaaac

SEQ ID NO: 118563 - DNA, 23 bp, Artificial Sequence
  primer
cccaagagctatcagaagtacca

SEQ ID NO: 118564 - DNA, 38 bp, Artificial Sequence
  primer
gtaaaacgacggccagttcccattcccagtttccatac

SEQ ID NO: 118565 - DNA, 39 bp, Artificial Sequence
  primer
gtaaaacgacggccagtcccagagatcatgtcatggttg

SEQ ID NO: 118566 - DNA, 43 bp, Artificial Sequence
  primer
gtaaaacgacggccagttgttcatctgtgtgttagtgaatcag

SEQ ID NO: 118567 - DNA, 21 bp, Artificial Sequence
  primer
acgtaactggtctgagtgggc

SEQ ID NO: 118568 - DNA, 21 bp, Artificial Sequence
  primer
aggctgtgacaacactgatgg

SEQ ID NO: 118569 - DNA, 21 bp, Artificial Sequence
  primer
taccctttctgcagcagtacc

SEQ ID NO: 118570 - DNA, 21 bp, Artificial Sequence
  primer
cagaggaactgcccttagcag

SEQ ID NO: 118571 - DNA, 38 bp, Artificial Sequence
  primer
gtaaaacgacggccagtaggctaaggatgggtccctac

SEQ ID NO: 118572 - DNA, 23 bp, Artificial Sequence
  primer
ccaaatacaagactccagtgagc

SEQ ID NO: 118573 - DNA, 21 bp, Artificial Sequence
  primer
aggaatgaacagcaaagctga

SEQ ID NO: 118574 - DNA, 43 bp, Artificial Sequence
  primer
gtaaaacgacggccagtgaaaccaagtagtgtaaggcattagg

SEQ ID NO: 118575 - DNA, 39 bp, Artificial Sequence
  primer
gtaaaacgacggccagttcaaagctgcaaagcatacaaa

SEQ ID NO: 118576 - DNA, 24 bp, Artificial Sequence
  primer
cacatgcaatgagttactttgacc

SEQ ID NO: 118577 - DNA, 42 bp, Artificial Sequence
  primer
gtaaaacgacggccagttggaggaattaaaggaccacattag

SEQ ID NO: 118578 - DNA, 23 bp, Artificial Sequence
  primer
ggctcttcaggatttgtttcttc

SEQ ID NO: 118579 - DNA, 44 bp, Artificial Sequence
  primer
gtaaaacgacggccagtttgagtttctcttctttaattgtgaaa

SEQ ID NO: 118580 - DNA, 40 bp, Artificial Sequence
  primer
gtaaaacgacggccagttttcagcacatggatttatcttt

SEQ ID NO: 118581 - DNA, 22 bp, Artificial Sequence
  primer
ggtgagtgcatctttcatctcc

SEQ ID NO: 118582 - DNA, 20 bp, Artificial Sequence
  primer
catccatttgaatgcttccc

SEQ ID NO: 118583 - DNA, 42 bp, Artificial Sequence
  primer
gtaaaacgacggccagtctaaacatgcttctaaaccttctgg

SEQ ID NO: 118584 - DNA, 44 bp, Artificial Sequence
  primer
gtaaaacgacggccagtggcaaagacttccatattcactatatc

SEQ ID NO: 118585 - DNA, 22 bp, Artificial Sequence
  primer
ttatgacatttccctaacagca

SEQ ID NO: 118586 - DNA, 23 bp, Artificial Sequence
  primer
aacaaacattatgaggcactgga

SEQ ID NO: 118587 - DNA, 21 bp, Artificial Sequence
  primer
aggcaaattacactccttgcc

SEQ ID NO: 118588 - DNA, 24 bp, Artificial Sequence
  primer
aaagctaaatatcatggtcaccca

SEQ ID NO: 118589 - DNA, 25 bp, Artificial Sequence
  primer
tttgaattagtgacacaccatgaaa

SEQ ID NO: 118590 - DNA, 43 bp, Artificial Sequence
  primer
gtaaaacgacggccagttgcctattagggaatttgtaacattt

SEQ ID NO: 118591 - DNA, 21 bp, Artificial Sequence
  primer
ccgctgtactaagcttcggtg

SEQ ID NO: 118592 - DNA, 27 bp, Artificial Sequence
  primer
acattactcttcaattaaagcttggtt

SEQ ID NO: 118593 - DNA, 38 bp, Artificial Sequence
  primer
gtaaaacgacggccagttgggatagaggtgcaagaaca

SEQ ID NO: 118594 - DNA, 21 bp, Artificial Sequence
  primer
tcactgaatcagagccacagg

SEQ ID NO: 118595 - DNA, 38 bp, Artificial Sequence
  primer
gtaaaacgacggccagtgtgggtcatttcctagaaccg

SEQ ID NO: 118596 - DNA, 41 bp, Artificial Sequence
  primer
gtaaaacgacggccagtgccagctttgtaagtataaggtgc

SEQ ID NO: 118597 - DNA, 38 bp, Artificial Sequence
  primer
gtaaaacgacggccagttccagctttcaccaagtgcta

SEQ ID NO: 118598 - DNA, 36 bp, Artificial Sequence
  primer
gtaaaacgacggccagtgaggttgctgagtgctccc

SEQ ID NO: 118599 - DNA, 37 bp, Artificial Sequence
  primer
gtaaaacgacggccagtaccatgccctaccaagaagg

SEQ ID NO: 118600 - DNA, 21 bp, Artificial Sequence
  primer
gcagggagaagaacaaggaag

SEQ ID NO: 118601 - DNA, 38 bp, Artificial Sequence
  primer
gtaaaacgacggccagtaaactgctctcaggatcaccc

SEQ ID NO: 118602 - DNA, 21 bp, Artificial Sequence
  primer
aaatgatcctggcaagacacc

SEQ ID NO: 118603 - DNA, 21 bp, Artificial Sequence
  primer
tgggtgtagcaactggtcttg

SEQ ID NO: 118604 - DNA, 38 bp, Artificial Sequence
  primer
gtaaaacgacggccagtcacccaaagcaggaagttagc

SEQ ID NO: 118605 - DNA, 38 bp, Artificial Sequence
  primer
gtaaaacgacggccagtgcagcacttagaggttctggg

SEQ ID NO: 118606 - DNA, 21 bp, Artificial Sequence
  primer
cttcccttgaccttgatcctg

SEQ ID NO: 118607 - DNA, 21 bp, Artificial Sequence
  primer
gttctgagaggtgaggatggg

SEQ ID NO: 118608 - DNA, 21 bp, Artificial Sequence
  primer
aatctgattcccttgccactc

SEQ ID NO: 118609 - DNA, 38 bp, Artificial Sequence
  primer
gtaaaacgacggccagtagaacatccctctcttctgcc

SEQ ID NO: 118610 - DNA, 21 bp, Artificial Sequence
  primer
ctagcttgctgctgttcctcc

SEQ ID NO: 118611 - DNA, 21 bp, Artificial Sequence
  primer
cagctgaagaggccaagaaac

SEQ ID NO: 118612 - DNA, 21 bp, Artificial Sequence
  primer
gctggtttgatataccctggc

SEQ ID NO: 118613 - DNA, 20 bp, Artificial Sequence
  primer
gcctgcagtatccatgaccc

SEQ ID NO: 118614 - DNA, 38 bp, Artificial Sequence
  primer
gtaaaacgacggccagtaggaccggctctttcctacac

SEQ ID NO: 118615 - DNA, 21 bp, Artificial Sequence
  primer
gaagcgcaccataatcatcac

SEQ ID NO: 118616 - DNA, 38 bp, Artificial Sequence
  primer
gtaaaacgacggccagtgagagaggagggagtgagcag

SEQ ID NO: 118617 - DNA, 21 bp, Artificial Sequence
  primer
cccacggtaagcacagtatgg

SEQ ID NO: 118618 - DNA, 38 bp, Artificial Sequence
  primer
gtaaaacgacggccagtgctagcctgtcagttcactcg

SEQ ID NO: 118619 - DNA, 39 bp, Artificial Sequence
  primer
gtaaaacgacggccagtcttggacttctgggagaaacac

SEQ ID NO: 118620 - DNA, 21 bp, Artificial Sequence
  primer
acctgaaatagtttccagcgg

SEQ ID NO: 118621 - DNA, 38 bp, Artificial Sequence
  primer
gtaaaacgacggccagtaaagccttgattcttggcagt

SEQ ID NO: 118622 - DNA, 24 bp, Artificial Sequence
  primer
tctttctctgccttcacacataag

SEQ ID NO: 118623 - DNA, 38 bp, Artificial Sequence
  primer
gtaaaacgacggccagtggaagtgggtaaagccctcac

SEQ ID NO: 118624 - DNA, 23 bp, Artificial Sequence
  primer
caattatgtcacaagtcacgagc

SEQ ID NO: 118625 - DNA, 38 bp, Artificial Sequence
  primer
gtaaaacgacggccagtagagaccatttgcaaaccctg

SEQ ID NO: 118626 - DNA, 19 bp, Artificial Sequence
  primer
acaggcatgagtcaccgac

SEQ ID NO: 118627 - DNA, 37 bp, Artificial Sequence
  primer
gtaaaacgacggccagttgtttcaacatccggagagg

SEQ ID NO: 118628 - DNA, 38 bp, Artificial Sequence
  primer
gtaaaacgacggccagtttccacgtccttgtcctaaac

SEQ ID NO: 118629 - DNA, 21 bp, Artificial Sequence
  primer
tagcaggaggcagtaaggacc

SEQ ID NO: 118630 - DNA, 19 bp, Artificial Sequence
  primer
aggctgccgcctaaatgag

SEQ ID NO: 118631 - DNA, 41 bp, Artificial Sequence
  primer
gtaaaacgacggccagttgggagctcttcaagataactttc

SEQ ID NO: 118632 - DNA, 39 bp, Artificial Sequence
  primer
gtaaaacgacggccagtgtgaatcatcgcttgcataaag

SEQ ID NO: 118633 - DNA, 36 bp, Artificial Sequence
  primer
gtaaaacgacggccagtcctgcccagagttcaggag

SEQ ID NO: 118634 - DNA, 41 bp, Artificial Sequence
  primer
gtaaaacgacggccagtatgactacaacccaccatattcag

SEQ ID NO: 118635 - DNA, 39 bp, Artificial Sequence
  primer
gtaaaacgacggccagtttgtgctttaaattccactccc

SEQ ID NO: 118636 - DNA, 25 bp, Artificial Sequence
  primer
tccacaacgtaaataggatcaactc

SEQ ID NO: 118637 - DNA, 39 bp, Artificial Sequence
  primer
gtaaaacgacggccagtaaatggaaaccttagagggagg

SEQ ID NO: 118638 - DNA, 21 bp, Artificial Sequence
  primer
aaatgttgctcgtggatgatg

SEQ ID NO: 118639 - DNA, 35 bp, Artificial Sequence
  primer
gtaaaacgacggccagtaggcccagccacagaaag

SEQ ID NO: 118640 - DNA, 41 bp, Artificial Sequence
  primer
gtaaaacgacggccagttgttggtattccactactcaaagc

SEQ ID NO: 118641 - DNA, 38 bp, Artificial Sequence
  primer
gtaaaacgacggccagttggaaaccgactcttcaaatg

SEQ ID NO: 118642 - DNA, 38 bp, Artificial Sequence
  primer
gtaaaacgacggccagtctgggaaccttaacaagaccc

SEQ ID NO: 118643 - DNA, 41 bp, Artificial Sequence
  primer
gtaaaacgacggccagttgagttgccttaaatcagaaacaa

SEQ ID NO: 118644 - DNA, 22 bp, Artificial Sequence
  primer
caaccacaaatccctggataac

SEQ ID NO: 118645 - DNA, 38 bp, Artificial Sequence
  primer
gtaaaacgacggccagtggagtcctttggaaacagtcg

SEQ ID NO: 118646 - DNA, 23 bp, Artificial Sequence
  primer
catgccattccataatgttacag

SEQ ID NO: 118647 - DNA, 20 bp, Artificial Sequence
  primer
agctaaccagagccagaccc

SEQ ID NO: 118648 - DNA, 38 bp, Artificial Sequence
  primer
gtaaaacgacggccagtttatgcatgccttgctcaaac

SEQ ID NO: 118649 - DNA, 27 bp, Artificial Sequence
  primer
ttcttacatacccatctttaccttctg

SEQ ID NO: 118650 - DNA, 38 bp, Artificial Sequence
  primer
gtaaaacgacggccagtcagggtgttattgggaggaac

SEQ ID NO: 118651 - DNA, 24 bp, Artificial Sequence
  primer
gtggaatacctgacaagagttctg

SEQ ID NO: 118652 - DNA, 23 bp, Artificial Sequence
  primer
cacatatttgcactgacagatgg

SEQ ID NO: 118653 - DNA, 22 bp, Artificial Sequence
  primer
gggaatatcatgctggattctg

SEQ ID NO: 118654 - DNA, 24 bp, Artificial Sequence
  primer
tgatcatttccaaccaattgtatc

SEQ ID NO: 118655 - DNA, 25 bp, Artificial Sequence
  primer
catggtatgccatatttaactgagc

SEQ ID NO: 118656 - DNA, 41 bp, Artificial Sequence
  primer
gtaaaacgacggccagtaaactgacttaaacaagggaaacg

SEQ ID NO: 118657 - DNA, 38 bp, Artificial Sequence
  primer
gtaaaacgacggccagtaatgttgtcgtgaggagggag

SEQ ID NO: 118658 - DNA, 21 bp, Artificial Sequence
  primer
ctgtagaacacgctccaatgc

SEQ ID NO: 118659 - DNA, 21 bp, Artificial Sequence
  primer
tgctggcactaagacttgagg

SEQ ID NO: 118660 - DNA, 21 bp, Artificial Sequence
  primer
accataacctcattcgcactg

SEQ ID NO: 118661 - DNA, 38 bp, Artificial Sequence
  primer
gtaaaacgacggccagtttggctgtggaataaagttgc

SEQ ID NO: 118662 - DNA, 23 bp, Artificial Sequence
  primer
tgtacaccacctgagtgcttatg

SEQ ID NO: 118663 - DNA, 42 bp, Artificial Sequence
  primer
gtaaaacgacggccagtgcaaacgcatatagtagtctcaagc

SEQ ID NO: 118664 - DNA, 21 bp, Artificial Sequence
  primer
gatgctacagaaacccttggc

SEQ ID NO: 118665 - DNA, 21 bp, Artificial Sequence
  primer
aaagtatgacccaatccacgc

SEQ ID NO: 118666 - DNA, 21 bp, Artificial Sequence
  primer
aaagactgggaaaccctgcta

SEQ ID NO: 118667 - DNA, 25 bp, Artificial Sequence
  primer
gcagcagtatgtcaatatgtaaacg

SEQ ID NO: 118668 - DNA, 21 bp, Artificial Sequence
  primer
cagcctgggtaagagtgtgag

SEQ ID NO: 118669 - DNA, 24 bp, Artificial Sequence
  primer
tccttactccaaatgttgacaatg

SEQ ID NO: 118670 - DNA, 38 bp, Artificial Sequence
  primer
gtaaaacgacggccagtgagaaattcccacccagacag

SEQ ID NO: 118671 - DNA, 38 bp, Artificial Sequence
  primer
gtaaaacgacggccagttcctcctttctagcatttggc

SEQ ID NO: 118672 - DNA, 21 bp, Artificial Sequence
  primer
acaaagcacatatggaggctg

SEQ ID NO: 118673 - DNA, 47 bp, Artificial Sequence
  primer
gtaaaacgacggccagtcaagtctataaatggtaactagacatggat

SEQ ID NO: 118674 - DNA, 22 bp, Artificial Sequence
  primer
tgacaaatctcttgactgctgg

SEQ ID NO: 118675 - DNA, 21 bp, Artificial Sequence
  primer
gatgctagggaaccaaactgc

SEQ ID NO: 118676 - DNA, 23 bp, Artificial Sequence
  primer
gaaaccatgattaccactgttgg

SEQ ID NO: 118677 - DNA, 38 bp, Artificial Sequence
  primer
gtaaaacgacggccagtataatttcaaccgcctctggg

SEQ ID NO: 118678 - DNA, 26 bp, Artificial Sequence
  primer
ccttcagtaaacactgccttattctc

SEQ ID NO: 118679 - DNA, 38 bp, Artificial Sequence
  primer
gtaaaacgacggccagttatgatggcacccacatactg

SEQ ID NO: 118680 - DNA, 38 bp, Artificial Sequence
  primer
gtaaaacgacggccagtcagaaatcctgctttcatccc

SEQ ID NO: 118681 - DNA, 21 bp, Artificial Sequence
  primer
tcccagttcagtctcccaaag

SEQ ID NO: 118682 - DNA, 38 bp, Artificial Sequence
  primer
gtaaaacgacggccagtttgtttgcaacaggacgtagg

SEQ ID NO: 118683 - DNA, 39 bp, Artificial Sequence
  primer
gtaaaacgacggccagtcacgttcatctctttcattccc

SEQ ID NO: 118684 - DNA, 26 bp, Artificial Sequence
  primer
ttggtctggattcttaaacttaggtg

SEQ ID NO: 118685 - DNA, 38 bp, Artificial Sequence
  primer
gtaaaacgacggccagtatacagcaatttcccaaaccc

SEQ ID NO: 118686 - DNA, 23 bp, Artificial Sequence
  primer
tttgtgaccttctataattgccc

SEQ ID NO: 118687 - DNA, 22 bp, Artificial Sequence
  primer
tctctttaaggtaccaccaggg

SEQ ID NO: 118688 - DNA, 37 bp, Artificial Sequence
  primer
gtaaaacgacggccagtaggcgtgagccatgtagttg

SEQ ID NO: 118689 - DNA, 21 bp, Artificial Sequence
  primer
gtcttcacagggactcacacg

SEQ ID NO: 118690 - DNA, 20 bp, Artificial Sequence
  primer
actgctggagggaactaggg

SEQ ID NO: 118691 - DNA, 21 bp, Artificial Sequence
  primer
atgcacactgcacccataaag

SEQ ID NO: 118692 - DNA, 21 bp, Artificial Sequence
  primer
catctacctccatcccattcc

SEQ ID NO: 118693 - DNA, 22 bp, Artificial Sequence
  primer
agagctgacacaattcttgctg

SEQ ID NO: 118694 - DNA, 22 bp, Artificial Sequence
  primer
gagggcagagataaacagaccc

SEQ ID NO: 118695 - DNA, 21 bp, Artificial Sequence
  primer
agtgacctcccaaatccaaag

SEQ ID NO: 118696 - DNA, 24 bp, Artificial Sequence
  primer
ccctaaatcactcagcaaatgttc

SEQ ID NO: 118697 - DNA, 41 bp, Artificial Sequence
  primer
gtaaaacgacggccagtggcagttctcagtacaatggaaag

SEQ ID NO: 118698 - DNA, 21 bp, Artificial Sequence
  primer
ctttggttctgacagcgtttg

SEQ ID NO: 118699 - DNA, 21 bp, Artificial Sequence
  primer
tcccaatctgcatacaccatc

SEQ ID NO: 118700 - DNA, 38 bp, Artificial Sequence
  primer
gtaaaacgacggccagtttcctacaccaccatggacag

SEQ ID NO: 118701 - DNA, 35 bp, Artificial Sequence
  primer
gtaaaacgacggccagtctggcccggtcctcctac

SEQ ID NO: 118702 - DNA, 21 bp, Artificial Sequence
  primer
agctgtactcatgccaaccag

SEQ ID NO: 118703 - DNA, 21 bp, Artificial Sequence
  primer
gagaacagcagcttctagggc

SEQ ID NO: 118704 - DNA, 21 bp, Artificial Sequence
  primer
tacctggagaagcaaagctcc

SEQ ID NO: 118705 - DNA, 38 bp, Artificial Sequence
  primer
gtaaaacgacggccagttttgtttgacagcaggaatgg

SEQ ID NO: 118706 - DNA, 20 bp, Artificial Sequence
  primer
acctggagaagcaaagctcc

SEQ ID NO: 118707 - DNA, 21 bp, Artificial Sequence
  primer
aagttattgctcccgttgtgg

SEQ ID NO: 118708 - DNA, 21 bp, Artificial Sequence
  primer
tgtcacaggtcttcaccttgc

SEQ ID NO: 118709 - DNA, 38 bp, Artificial Sequence
  primer
gtaaaacgacggccagtgaccaagtaaagagcgcttcc

SEQ ID NO: 118710 - DNA, 38 bp, Artificial Sequence
  primer
gtaaaacgacggccagtaccaccaggctgttcgtattc

SEQ ID NO: 118711 - DNA, 21 bp, Artificial Sequence
  primer
gaacgaaatggcacctcactc

SEQ ID NO: 118712 - DNA, 22 bp, Artificial Sequence
  primer
cagcagccagattagccattag

SEQ ID NO: 118713 - DNA, 21 bp, Artificial Sequence
  primer
gcgaacatagccaaagatgtg

SEQ ID NO: 118714 - DNA, 21 bp, Artificial Sequence
  primer
ttatactgcaccactgggacc

SEQ ID NO: 118715 - DNA, 35 bp, Artificial Sequence
  primer
gtaaaacgacggccagtcctggcaattgggtaggg

SEQ ID NO: 118716 - DNA, 21 bp, Artificial Sequence
  primer
gaacatactgccctccctgag

SEQ ID NO: 118717 - DNA, 38 bp, Artificial Sequence
  primer
gtaaaacgacggccagtcttacggctgctggacttcac

SEQ ID NO: 118718 - DNA, 38 bp, Artificial Sequence
  primer
gtaaaacgacggccagtccaacacgatgaaccactgag

SEQ ID NO: 118719 - DNA, 37 bp, Artificial Sequence
  primer
gtaaaacgacggccagtcgagtcacagctcttgaggg

SEQ ID NO: 118720 - DNA, 21 bp, Artificial Sequence
  primer
gaaccagccctcaagtgaaag

SEQ ID NO: 118721 - DNA, 38 bp, Artificial Sequence
  primer
gtaaaacgacggccagtggtgtacacagccaccatgag

SEQ ID NO: 118722 - DNA, 21 bp, Artificial Sequence
  primer
tcacctccttggaggacattc

SEQ ID NO: 118723 - DNA, 19 bp, Artificial Sequence
  primer
ccaggagcacccacaagtc

SEQ ID NO: 118724 - DNA, 37 bp, Artificial Sequence
  primer
gtaaaacgacggccagtagctcttgtcgctgccatac

SEQ ID NO: 118725 - DNA, 21 bp, Artificial Sequence
  primer
ggacaggcatagtccagaagg

SEQ ID NO: 118726 - DNA, 37 bp, Artificial Sequence
  primer
gtaaaacgacggccagtctgcgccacgtgtagatgac

SEQ ID NO: 118727 - DNA, 38 bp, Artificial Sequence
  primer
gtaaaacgacggccagtgcactgcaacactgctatgtg

SEQ ID NO: 118728 - DNA, 20 bp, Artificial Sequence
  primer
tgaagagcaggctgaaggtg

SEQ ID NO: 118729 - DNA, 37 bp, Artificial Sequence
  primer
gtaaaacgacggccagtagaggttggagccaaagacg

SEQ ID NO: 118730 - DNA, 37 bp, Artificial Sequence
  primer
gtaaaacgacggccagtaccatccacacgcaagactg

SEQ ID NO: 118731 - DNA, 38 bp, Artificial Sequence
  primer
gtaaaacgacggccagtgtgcacacagcttcctgtacc

SEQ ID NO: 118732 - DNA, 21 bp, Artificial Sequence
  primer
gattgacatgtgcctctccac

SEQ ID NO: 118733 - DNA, 38 bp, Artificial Sequence
  primer
gtaaaacgacggccagtcaccacagatgctccgtaaag

SEQ ID NO: 118734 - DNA, 38 bp, Artificial Sequence
  primer
gtaaaacgacggccagtcctggtacaccacagatgctc

SEQ ID NO: 118735 - DNA, 44 bp, Artificial Sequence
  primer
gtaaaacgacggccagtggctttgttagagacaggtaatcattc

SEQ ID NO: 118736 - DNA, 37 bp, Artificial Sequence
  primer
gtaaaacgacggccagtgcagtgagtgccacgaagac

SEQ ID NO: 118737 - DNA, 20 bp, Artificial Sequence
  primer
gcgtacctggcagtagatgc

SEQ ID NO: 118738 - DNA, 38 bp, Artificial Sequence
  primer
gtaaaacgacggccagttgcaggagtacaggacaggtg

SEQ ID NO: 118739 - DNA, 18 bp, Artificial Sequence
  primer
actgctgggagccactcg

SEQ ID NO: 118740 - DNA, 38 bp, Artificial Sequence
  primer
gtaaaacgacggccagtacctttggctgcatttcctac

SEQ ID NO: 118741 - DNA, 19 bp, Artificial Sequence
  primer
gctgtcttctaccgctccc

SEQ ID NO: 118742 - DNA, 38 bp, Artificial Sequence
  primer
gtaaaacgacggccagttaatgcaccacagccaaactg

SEQ ID NO: 118743 - DNA, 39 bp, Artificial Sequence
  primer
gtaaaacgacggccagtagcatagtgagctcagcaaata

SEQ ID NO: 118744 - DNA, 37 bp, Artificial Sequence
  primer
gtaaaacgacggccagtaaagccagggctctcttctg

SEQ ID NO: 118745 - DNA, 21 bp, Artificial Sequence
  primer
tgccatttcaatggattatgc

SEQ ID NO: 118746 - DNA, 41 bp, Artificial Sequence
  primer
gtaaaacgacggccagtttcctctgaccataaggaagagtc

SEQ ID NO: 118747 - DNA, 39 bp, Artificial Sequence
  primer
gtaaaacgacggccagttcttctcctgaagaccttgtca

SEQ ID NO: 118748 - DNA, 20 bp, Artificial Sequence
  primer
tccctgtgctttctttgacc

SEQ ID NO: 118749 - DNA, 22 bp, Artificial Sequence
  primer
gcgtgaaggtaacgactctgac

SEQ ID NO: 118750 - DNA, 41 bp, Artificial Sequence
  primer
gtaaaacgacggccagtgcagttaattcaatcaaacttggg

SEQ ID NO: 118751 - DNA, 22 bp, Artificial Sequence
  primer
ttgcctaccataatttgagcac

SEQ ID NO: 118752 - DNA, 40 bp, Artificial Sequence
  primer
gtaaaacgacggccagtcagacacttgctctctaagctgc

SEQ ID NO: 118753 - DNA, 37 bp, Artificial Sequence
  primer
gtaaaacgacggccagtactgaggcacttggatggtg

SEQ ID NO: 118754 - DNA, 39 bp, Artificial Sequence
  primer
gtaaaacgacggccagtaggaaggcagtaccatgatagg

SEQ ID NO: 118755 - DNA, 38 bp, Artificial Sequence
  primer
gtaaaacgacggccagttaagaagggctggaggaacag

SEQ ID NO: 118756 - DNA, 38 bp, Artificial Sequence
  primer
gtaaaacgacggccagtcagggtggagagtgcagagtc

SEQ ID NO: 118757 - DNA, 39 bp, Artificial Sequence
  primer
gtaaaacgacggccagtgcacctctgtatttgcagaacc

SEQ ID NO: 118758 - DNA, 39 bp, Artificial Sequence
  primer
gtaaaacgacggccagtgggagagatggaatgtgtcaac

SEQ ID NO: 118759 - DNA, 38 bp, Artificial Sequence
  primer
gtaaaacgacggccagtgctagtctcccagacacctgc

SEQ ID NO: 118760 - DNA, 21 bp, Artificial Sequence
  primer
agtccacttccaggcctagtg

SEQ ID NO: 118761 - DNA, 20 bp, Artificial Sequence
  primer
cagagagtccacaagccctg

SEQ ID NO: 118762 - DNA, 37 bp, Artificial Sequence
  primer
gtaaaacgacggccagtcagggaccgacaagtgacag

SEQ ID NO: 118763 - DNA, 38 bp, Artificial Sequence
  primer
gtaaaacgacggccagtgtgtgagcaatgacagaagcc

SEQ ID NO: 118764 - DNA, 38 bp, Artificial Sequence
  primer
gtaaaacgacggccagtcccaggcaaattcacttcttg

SEQ ID NO: 118765 - DNA, 19 bp, Artificial Sequence
  primer
caggcaagagtttgctccc

SEQ ID NO: 118766 - DNA, 20 bp, Artificial Sequence
  primer
gtcctcctgggaatgagcag

SEQ ID NO: 118767 - DNA, 21 bp, Artificial Sequence
  primer
ctcagcacctcctttctctgg

SEQ ID NO: 118768 - DNA, 37 bp, Artificial Sequence; identical to SEQ ID NO: 118762
  primer

SEQ ID NO: 118769 - DNA, 38 bp, Artificial Sequence; identical to SEQ ID NO: 118764
  primer

SEQ ID NO: 118770 - DNA, 39 bp, Artificial Sequence
  primer
gtaaaacgacggccagtcagagcatgggtttaaatttgc

SEQ ID NO: 118771 - DNA, 37 bp, Artificial Sequence
  primer
gtaaaacgacggccagtgtctgcagcaactctccacg

SEQ ID NO: 118772 - DNA, 21 bp, Artificial Sequence
  primer
gctaatcaacagctgtcctgg

SEQ ID NO: 118773 - DNA, 37 bp, Artificial Sequence
  primer
gtaaaacgacggccagttgtggcgatgtcatcaagtc

SEQ ID NO: 118774 - DNA, 36 bp, Artificial Sequence
  primer
gtaaaacgacggccagtctatttgggcccagccttc

SEQ ID NO: 118775 - DNA, 38 bp, Artificial Sequence
  primer
gtaaaacgacggccagtacgggcatgtagagtagctgg

SEQ ID NO: 118776 - DNA, 21 bp, Artificial Sequence
  primer
aactggaattggctgtgtctg

SEQ ID NO: 118777 - DNA, 21 bp, Artificial Sequence
  primer
tcagagaagagattcccggac

SEQ ID NO: 118778 - DNA, 37 bp, Artificial Sequence
  primer
gtaaaacgacggccagtacacaaggcaggacacaacc

SEQ ID NO: 118779 - DNA, 38 bp, Artificial Sequence
  primer
gtaaaacgacggccagtagggaagctccctctacaagc

SEQ ID NO: 118780 - DNA, 21 bp, Artificial Sequence
  primer
actccaagaagcaacagctcg

SEQ ID NO: 118781 - DNA, 23 bp, Artificial Sequence
  primer
gccaaggacagtcataaatcaac

SEQ ID NO: 118782 - DNA, 38 bp, Artificial Sequence
  primer
gtaaaacgacggccagtatgtgaagtggaaccgaagtg

SEQ ID NO: 118783 - DNA, 23 bp, Artificial Sequence
  primer
gagtctccatgacttcctaaggg

SEQ ID NO: 118784 - DNA, 22 bp, Artificial Sequence
  primer
cagtagggagtggctgactagg

SEQ ID NO: 118785 - DNA, 20 bp, Artificial Sequence
  primer
ttccatgccgtaaacagctc

SEQ ID NO: 118786 - DNA, 19 bp, Artificial Sequence
  primer
ctagggaaggaaggagccc

SEQ ID NO: 118787 - DNA, 38 bp, Artificial Sequence
  primer
gtaaaacgacggccagtgtctcacaactaggcacaggc

SEQ ID NO: 118788 - DNA, 41 bp, Artificial Sequence
  primer
gtaaaacgacggccagtggaggaaggatatgctaaatgatg

SEQ ID NO: 118789 - DNA, 21 bp, Artificial Sequence
  primer
tatttatatcaggccgccacc

SEQ ID NO: 118790 - DNA, 20 bp, Artificial Sequence
  primer
gtgggcccatccagtaactc

SEQ ID NO: 118791 - DNA, 37 bp, Artificial Sequence
  primer
gtaaaacgacggccagttcatttggcaggcatcaaag

SEQ ID NO: 118792 - DNA, 23 bp, Artificial Sequence
  primer
caccattggaagtctatcacaaa

SEQ ID NO: 118793 - DNA, 41 bp, Artificial Sequence
  primer
gtaaaacgacggccagtgggaattgcttatttcctgatttc

SEQ ID NO: 118794 - DNA, 21 bp, Artificial Sequence
  primer
tctcaaatcctggcttcactc

SEQ ID NO: 118795 - DNA, 22 bp, Artificial Sequence
  primer
gaagcttccaggagctagagag

SEQ ID NO: 118796 - DNA, 23 bp, Artificial Sequence
  primer
tgagatctgacaacactacagga

SEQ ID NO: 118797 - DNA, 38 bp, Artificial Sequence
  primer
gtaaaacgacggccagtagactctagcagcctgatggg

SEQ ID NO: 118798 - DNA, 44 bp, Artificial Sequence
  primer
gtaaaacgacggccagttgattatccagacttcaaagttatcaa

SEQ ID NO: 118799 - DNA, 44 bp, Artificial Sequence
  primer
gtaaaacgacggccagttgaagaatcatttaaataaagcactta

SEQ ID NO: 118800 - DNA, 24 bp, Artificial Sequence
  primer
gggagaaagtcaaacaggaaagtt

SEQ ID NO: 118801 - DNA, 23 bp, Artificial Sequence
  primer
tggaactcatggagaaattaagg

SEQ ID NO: 118802 - DNA, 44 bp, Artificial Sequence
  primer
gtaaaacgacggccagttttataccacaacttcacctttctttg

SEQ ID NO: 118803 - DNA, 43 bp, Artificial Sequence
  primer
gtaaaacgacggccagtaagtctttaagcactacgatagcaaa

SEQ ID NO: 118804 - DNA, 38 bp, Artificial Sequence
  primer
gtaaaacgacggccagtttctcaggttaagcaatccca

SEQ ID NO: 118805 - DNA, 25 bp, Artificial Sequence
  primer
tttcagagaaatgaacctatgacct

SEQ ID NO: 118806 - DNA, 40 bp, Artificial Sequence
  primer
gtaaaacgacggccagtcaatgttgcaacttatccatctg

SEQ ID NO: 118807 - DNA, 21 bp, Artificial Sequence
  primer
taacatttccttgcccatttg

SEQ ID NO: 118808 - DNA, 41 bp, Artificial Sequence
  primer
gtaaaacgacggccagtaagaggtttgactggatgatctct

SEQ ID NO: 118809 - DNA, 23 bp, Artificial Sequence
  primer
caacagaacaatttgcctagcac

SEQ ID NO: 118810 - DNA, 21 bp, Artificial Sequence
  primer
tccaaccacatgtcagctatg

SEQ ID NO: 118811 - DNA, 46 bp, Artificial Sequence
  primer
gtaaaacgacggccagtcttaaatacctatagaggcttatgcactt

SEQ ID NO: 118812 - DNA, 27 bp, Artificial Sequence
  primer
ctgctaaacagagagtagctatttgaa

SEQ ID NO: 118813 - DNA, 44 bp, Artificial Sequence
  primer
gtaaaacgacggccagtagtaactaagttggaagacaaggactg

SEQ ID NO: 118814 - DNA, 19 bp, Artificial Sequence
  primer
tgcaaccagtgtccaaacc

SEQ ID NO: 118815 - DNA, 38 bp, Artificial Sequence
  primer
gtaaaacgacggccagtttcctgagtgacacctctccc

SEQ ID NO: 118816 - DNA, 21 bp, Artificial Sequence
  primer
atcctgagtacgaaatgcgtg

SEQ ID NO: 118817 - DNA, 42 bp, Artificial Sequence
  primer
gtaaaacgacggccagtgaaagaatcatattgctaaaccagc

SEQ ID NO: 118818 - DNA, 39 bp, Artificial Sequence
  primer
gtaaaacgacggccagttgggtgatagtgaagaaatcgg

SEQ ID NO: 118819 - DNA, 39 bp, Artificial Sequence
  primer
gtaaaacgacggccagtaaagactcatccaaagagagca

SEQ ID NO: 118820 - DNA, 21 bp, Artificial Sequence
  primer
ctttgtgcaaggttgtggttg

SEQ ID NO: 118821 - DNA, 39 bp, Artificial Sequence
  primer
gtaaaacgacggccagtcctgacaggctacatgaaacac

SEQ ID NO: 118822 - DNA, 23 bp, Artificial Sequence
  primer
ggtcttctaaactcattgttggg

SEQ ID NO: 118823 - DNA, 21 bp, Artificial Sequence
  primer
cataaagtgctccctgccaag

SEQ ID NO: 118824 - DNA, 38 bp, Artificial Sequence
  primer
gtaaaacgacggccagtgaatgacatcaaagggcaaag

SEQ ID NO: 118825 - DNA, 21 bp, Artificial Sequence
  primer
cttaaggatggcactgcaaat

SEQ ID NO: 118826 - DNA, 41 bp, Artificial Sequence
  primer
gtaaaacgacggccagttctaaatgctctacgtgcccttac

SEQ ID NO: 118827 - DNA, 21 bp, Artificial Sequence
  primer
cttaaggatggcactgcaaat

SEQ ID NO: 118828 - DNA, 40 bp, Artificial Sequence
  primer
gtaaaacgacggccagttcactttgggttacagaagcaac

SEQ ID NO: 118829 - DNA, 21 bp, Artificial Sequence
  primer
gcaacaatcaggacagcacag

SEQ ID NO: 118830 - DNA, 39 bp, Artificial Sequence
  primer
gtaaaacgacggccagtcaagcatgccaatttgtgtaag

SEQ ID NO: 118831 - DNA, 21 bp, Artificial Sequence
  primer
ccgttgtaacgttgactggag

SEQ ID NO: 118832 - DNA, 21 bp, Artificial Sequence
  primer
cttatttggcctggatggttc

SEQ ID NO: 118833 - DNA, 21 bp, Artificial Sequence
  primer
acgaacagcaaagcgacctat

SEQ ID NO: 118834 - DNA, 39 bp, Artificial Sequence
  primer
gtaaaacgacggccagtaatggccaattgaaacaaacag

SEQ ID NO: 118835 - DNA, 20 bp, Artificial Sequence
  primer
cctggaggaggtcacctgag

SEQ ID NO: 118836 - DNA, 21 bp, Artificial Sequence
  primer
agcacaggagaccctaccatc

SEQ ID NO: 118837 - DNA, 21 bp, Artificial Sequence
  primer
agttagggaaacccagcaggt

SEQ ID NO: 118838 - DNA, 21 bp, Artificial Sequence
  primer
gagagattggagacagcccag

SEQ ID NO: 118839 - DNA, 18 bp, Artificial Sequence
  primer
gacagcagcctcacccag

SEQ ID NO: 118840 - DNA, 18 bp, Artificial Sequence
  primer
agtcctctgccctcagcc

SEQ ID NO: 118841 - DNA, 38 bp, Artificial Sequence
  primer
gtaaaacgacggccagtacatgtattaactgggcagcg

SEQ ID NO: 118842 - DNA, 38 bp, Artificial Sequence
  primer
gtaaaacgacggccagtatggagggcttcagtctcttg

SEQ ID NO: 118843 - DNA, 20 bp, Artificial Sequence
  primer
gctgggattacagatgcctg

SEQ ID NO: 118844 - DNA, 39 bp, Artificial Sequence
  primer
gtaaaacgacggccagtccagtagctgtggaagaacctg

SEQ ID NO: 118845 - DNA, 21 bp, Artificial Sequence
  primer
aaagcagtgatctgctcctcc

SEQ ID NO: 118846 - DNA, 35 bp, Artificial Sequence
  primer
gtaaaacgacggccagttgaaccaccacacctggc

SEQ ID NO: 118847 - DNA, 19 bp, Artificial Sequence
  primer
gctgaatccgctttgtgtg

SEQ ID NO: 118848 - DNA, 19 bp, Artificial Sequence
  primer
ctgtcctggctcttcctgg

SEQ ID NO: 118849 - DNA, 21 bp, Artificial Sequence
  primer
tggtcgaaggaggacttgttg

SEQ ID NO: 118850 - DNA, 39 bp, Artificial Sequence
  primer
gtaaaacgacggccagtggaagtaacagtagggcaaggc

SEQ ID NO: 118851 - DNA, 38 bp, Artificial Sequence
  primer
gtaaaacgacggccagtctgctcctgcattcaactctg

SEQ ID NO: 118852 - DNA, 19 bp, Artificial Sequence
  primer
gctgaatccgctttgtgtg

SEQ ID NO: 118853 - DNA, 38 bp, Artificial Sequence
  primer
gtaaaacgacggccagtatggaggtcacagagccacac

SEQ ID NO: 118854 - DNA, 21 bp, Artificial Sequence
  primer
ctcttctccagcacgttcagc

SEQ ID NO: 118855 - DNA, 38 bp, Artificial Sequence
  primer
gtaaaacgacggccagttgcccagggctaactgtaaac

SEQ ID NO: 118856 - DNA, 21 bp, Artificial Sequence
  primer
cccaagacttctaaactcggc

SEQ ID NO: 118857 - DNA, 38 bp, Artificial Sequence
  primer
gtaaaacgacggccagtagctgcgatatcgacactctg

SEQ ID NO: 118858 - DNA, 20 bp, Artificial Sequence
  primer
aggaaatgaccaggacggag

SEQ ID NO: 118859 - DNA, 37 bp, Artificial Sequence
  primer
gtaaaacgacggccagtgtagcagcatcctcactccg

SEQ ID NO: 118860 - DNA, 38 bp, Artificial Sequence
  primer
gtaaaacgacggccagtagaggtgaagaaggccaacag

SEQ ID NO: 118861 - DNA, 40 bp, Artificial Sequence
  primer
gtaaaacgacggccagtaaaggcaccttgtataaaggaat

SEQ ID NO: 118862 - DNA, 44 bp, Artificial Sequence
  primer
gtaaaacgacggccagtcaacttcaacaaataatgaatgactgt

SEQ ID NO: 118863 - DNA, 38 bp, Artificial Sequence
  primer
gtaaaacgacggccagtcaggccctaggaaccctactc

SEQ ID NO: 118864 - DNA, 39 bp, Artificial Sequence
  primer
gtaaaacgacggccagtccaccaccagagtgacagaatc

SEQ ID NO: 118865 - DNA, 37 bp, Artificial Sequence
  primer
gtaaaacgacggccagtagctcctcattgctcactgc

SEQ ID NO: 118866 - DNA, 21 bp, Artificial Sequence
  primer
tgcctacatatccttggcatc

SEQ ID NO: 118867 - DNA, 18 bp, Artificial Sequence
  primer
atgagccactgcacccac

SEQ ID NO: 118868 - DNA, 21 bp, Artificial Sequence
  primer
agcaagacaggaaatcaaggg

SEQ ID NO: 118869 - DNA, 38 bp, Artificial Sequence
  primer
gtaaaacgacggccagttggctctagctgtgtgtgagg

SEQ ID NO: 118870 - DNA, 22 bp, Artificial Sequence
  primer
ttcttcctcagcttgtccagtc

SEQ ID NO: 118871 - DNA, 38 bp, Artificial Sequence
  primer
gtaaaacgacggccagtcctgtgaacatgaactgctcc

SEQ ID NO: 118872 - DNA, 21 bp, Artificial Sequence
  primer
aggacaggaaagggttcaatg

SEQ ID NO: 118873 - DNA, 19 bp, Artificial Sequence
  primer
tacgtctcctcctggcacg

SEQ ID NO: 118874 - DNA, 20 bp, Artificial Sequence
  primer
cctgtctcgctggactgaac

SEQ ID NO: 118875 - DNA, 36 bp, Artificial Sequence
  primer
gtaaaacgacggccagtcactgtctccgtctgcacg

SEQ ID NO: 118876 - DNA, 38 bp, Artificial Sequence
  primer
gtaaaacgacggccagtctctgtcacccaacattcctg

SEQ ID NO: 118877 - DNA, 21 bp, Artificial Sequence
  primer
acgctgtgaatagcacaccac

SEQ ID NO: 118878 - DNA, 21 bp, Artificial Sequence
  primer
acctcagttaggagctgtgcc

SEQ ID NO: 118879 - DNA, 21 bp, Artificial Sequence
  primer
ccagagtctaaagcgaaaggg

SEQ ID NO: 118880 - DNA, 38 bp, Artificial Sequence
  primer
gtaaaacgacggccagtgcaagctttattccagtgcag

SEQ ID NO: 118881 - DNA, 21 bp, Artificial Sequence
  primer
acttctagctcccgactgagg

SEQ ID NO: 118882 - DNA, 21 bp, Artificial Sequence
  primer
cacagccacaactcaggacac

SEQ ID NO: 118883 - DNA, 21 bp, Artificial Sequence
  primer
gaccgagatcaagtctaggcg

SEQ ID NO: 118884 - DNA, 21 bp, Artificial Sequence
  primer
tagggtctctgtctcgggagg

SEQ ID NO: 118885 - DNA, 37 bp, Artificial Sequence
  primer
gtaaaacgacggccagtgacactgccagaagggaaag

SEQ ID NO: 118886 - DNA, 21 bp, Artificial Sequence
  primer
gacgcctcctttaacaccttg

SEQ ID NO: 118887 - DNA, 38 bp, Artificial Sequence
  primer
gtaaaacgacggccagtagtctccaggtgtcgtctgag

SEQ ID NO: 118888 - DNA, 38 bp, Artificial Sequence
  primer
gtaaaacgacggccagtccagggtttggaaatacgaag

SEQ ID NO: 118889 - DNA, 38 bp, Artificial Sequence
  primer
gtaaaacgacggccagtacttaggcctcactgattggg

SEQ ID NO: 118890 - DNA, 21 bp, Artificial Sequence
  primer
cttgagaccaggaggtcaagg

SEQ ID NO: 118891 - DNA, 21 bp, Artificial Sequence
  primer
gacaggaacctgggctacaag

SEQ ID NO: 118892 - DNA, 20 bp, Artificial Sequence
  primer
attcaccatggccctctttc

SEQ ID NO: 118893 - DNA, 21 bp, Artificial Sequence
  primer
cagggaccttcctctttaggg

SEQ ID NO: 118894 - DNA, 38 bp, Artificial Sequence
  primer
gtaaaacgacggccagtaaagcgcgtacagtgtctcag

SEQ ID NO: 118895 - DNA, 21 bp, Artificial Sequence
  primer
tccagccctggtattcatcag

SEQ ID NO: 118896 - DNA, 40 bp, Artificial Sequence
  primer
gtaaaacgacggccagtaaatgaaagctggtttagctctg

SEQ ID NO: 118897 - DNA, 38 bp, Artificial Sequence
  primer
gtaaaacgacggccagtaggctgacattcatctgcatc

SEQ ID NO: 118898 - DNA, 38 bp, Artificial Sequence
  primer
gtaaaacgacggccagttcaggacccactcatattccc

SEQ ID NO: 118899 - DNA, 21 bp, Artificial Sequence
  primer
ggcaggcagcagagatatgag

SEQ ID NO: 118900 - DNA, 21 bp, Artificial Sequence
  primer
gggaggaagtgattagcggag

SEQ ID NO: 118901 - DNA, 20 bp, Artificial Sequence
  primer
atgacttccaggatgggagg

SEQ ID NO: 118902 - DNA, 21 bp, Artificial Sequence
  primer
ctcgtttacccttcatgggac

SEQ ID NO: 118903 - DNA, 21 bp, Artificial Sequence
  primer
cccagtggaatggaaattagg

SEQ ID NO: 118904 - DNA, 21 bp, Artificial Sequence
  primer
tagctgccaaggagcaaagac

SEQ ID NO: 118905 - DNA, 36 bp, Artificial Sequence
  primer
gtaaaacgacggccagtctcgagcgaattcggacac

SEQ ID NO: 118906 - DNA, 21 bp, Artificial Sequence
  primer
ttactaggacgggaggctgac

SEQ ID NO: 118907 - DNA, 21 bp, Artificial Sequence
  primer
agggctgcctctctttctctc

SEQ ID NO: 118908 - DNA, 38 bp, Artificial Sequence
  primer
gtaaaacgacggccagtcagcagctgaacagacaaagg

SEQ ID NO: 118909 - DNA, 21 bp, Artificial Sequence
  primer
gactgaagaacatcaaccggc

SEQ ID NO: 118910 - DNA, 21 bp, Artificial Sequence
  primer
tcagcttgtacaccttcagcc

SEQ ID NO: 118911 - DNA, 38 bp, Artificial Sequence
  primer
gtaaaacgacggccagtaggtctctgagggcctttctg

SEQ ID NO: 118912 - DNA, 39 bp, Artificial Sequence
  primer
gtaaaacgacggccagtttaggaacctaagccaaggagc

SEQ ID NO: 118913 - DNA, 38 bp, Artificial Sequence
  primer
gtaaaacgacggccagtagagactgggagaggctgagg

SEQ ID NO: 118914 - DNA, 37 bp, Artificial Sequence
  primer
gtaaaacgacggccagtactagggtgccctgcttcag

SEQ ID NO: 118915 - DNA, 20 bp, Artificial Sequence
  primer
accctcccaccatcactctc

SEQ ID NO: 118916 - DNA, 21 bp, Artificial Sequence
  primer
tgctctgtgctgtagcctgtc

SEQ ID NO: 118917 - DNA, 21 bp, Artificial Sequence
  primer
taaagaagcggaggttcaagg

SEQ ID NO: 118918 - DNA, 37 bp, Artificial Sequence
  primer
gtaaaacgacggccagtaggagaggatggaggctgag

SEQ ID NO: 118919 - DNA, 21 bp, Artificial Sequence
  primer
gggaaagggaggttcagagac

SEQ ID NO: 118920 - DNA, 37 bp, Artificial Sequence
  primer
gtaaaacgacggccagtcaatggaatgatgctacggg

SEQ ID NO: 118921 - DNA, 37 bp, Artificial Sequence
  primer
gtaaaacgacggccagtgggaactccagatggacgag

SEQ ID NO: 118922 - DNA, 27 bp, Artificial Sequence
  primer
aaagagcataataaatccaaggtacag

SEQ ID NO: 118923 - DNA, 41 bp, Artificial Sequence
  primer
gtaaaacgacggccagtagagaggatcatttctacagtggg

SEQ ID NO: 118924 - DNA, 20 bp, Artificial Sequence
  primer
gccaccttaggacacactgc

SEQ ID NO: 118925 - DNA, 23 bp, Artificial Sequence
  primer
agctcgtccttagtaagaaaccc

SEQ ID NO: 118926 - DNA, 38 bp, Artificial Sequence
  primer
gtaaaacgacggccagtacgagacaacaacccatctcc

SEQ ID NO: 118927 - DNA, 41 bp, Artificial Sequence
  primer
gtaaaacgacggccagtttaattcgaaggtgacctgagttt

SEQ ID NO: 118928 - DNA, 21 bp, Artificial Sequence
  primer
tccagactttcaaacacagcc

SEQ ID NO: 118929 - DNA, 20 bp, Artificial Sequence
  primer
caggaaggtcagctccacac

SEQ ID NO: 118930 - DNA, 19 bp, Artificial Sequence
  primer
gggtgacaagggcagacag

SEQ ID NO: 118931 - DNA, 21 bp, Artificial Sequence
  primer
atgagaacttgccagcgctac

SEQ ID NO: 118932 - DNA, 38 bp, Artificial Sequence
  primer
gtaaaacgacggccagtggattaattcagagaaggcgg

SEQ ID NO: 118933 - DNA, 21 bp, Artificial Sequence
  primer
gctctaactggagggtggaag

SEQ ID NO: 118934 - DNA, 21 bp, Artificial Sequence
  primer
aagagaggtgtctggctgagg

SEQ ID NO: 118935 - DNA, 38 bp, Artificial Sequence
  primer
gtaaaacgacggccagtggcagcttctagctcatggtc

SEQ ID NO: 118936 - DNA, 38 bp, Artificial Sequence
  primer
gtaaaacgacggccagtcatttgcatcggtagttctcg

SEQ ID NO: 118937 - DNA, 38 bp, Artificial Sequence
  primer
gtaaaacgacggccagtgccagagtccaaatatggcag

SEQ ID NO: 118938 - DNA, 25 bp, Artificial Sequence
  primer
accctctatattgttcttccctttc

SEQ ID NO: 118939 - DNA, 37 bp, Artificial Sequence
  primer
gtaaaacgacggccagtaggcccaactctttctggag

SEQ ID NO: 118940 - DNA, 40 bp, Artificial Sequence
  primer
gtaaaacgacggccagttgtatcctcaacacaaagcacag

SEQ ID NO: 118941 - DNA, 38 bp, Artificial Sequence
  primer
gtaaaacgacggccagtcaaccagtggaggtcactgtc

SEQ ID NO: 118942 - DNA, 21 bp, Artificial Sequence
  primer
ctgctaggattctgaccatgc

SEQ ID NO: 118943 - DNA, 21 bp, Artificial Sequence
  primer
ttgggatcctggctgttattc

SEQ ID NO: 118944 - DNA, 37 bp, Artificial Sequence
  primer
gtaaaacgacggccagttgcacctattacatgccagg

SEQ ID NO: 118945 - DNA, 19 bp, Artificial Sequence
  primer
acccaggtggaatgctctg

SEQ ID NO: 118946 - DNA, 22 bp, Artificial Sequence
  primer
aattcatggtaatgggcaaatg

SEQ ID NO: 118947 - DNA, 24 bp, Artificial Sequence
  primer
gctgggaatacaaatagggtcaac

SEQ ID NO: 118948 - DNA, 23 bp, Artificial Sequence
  primer
acaatgtagcaaagcatttagca

SEQ ID NO: 118949 - DNA, 37 bp, Artificial Sequence
  primer
gtaaaacgacggccagtgagaggactgggctggagac

SEQ ID NO: 118950 - DNA, 38 bp, Artificial Sequence
  primer
gtaaaacgacggccagtaggttgcgcttgtctcctatc

SEQ ID NO: 118951 - DNA, 20 bp, Artificial Sequence
  primer
ccaggcagtgaagagctgac

SEQ ID NO: 118952 - DNA, 21 bp, Artificial Sequence
  primer
ggccaggacatcctcatagtc

SEQ ID NO: 118953 - DNA, 22 bp, Artificial Sequence
  primer
catctcagctgcttcaaagagg

SEQ ID NO: 118954 - DNA, 21 bp, Artificial Sequence
  primer
ataatggagcaccaaaggcac

SEQ ID NO: 118955 - DNA, 38 bp, Artificial Sequence
  primer
gtaaaacgacggccagtgcatcaaacttgctcatctcc

SEQ ID NO: 118956 - DNA, 38 bp, Artificial Sequence
  primer
gtaaaacgacggccagttgatccttagcttcgtcctcg

SEQ ID NO: 118957 - DNA, 21 bp, Artificial Sequence
  primer
attgagccacttggatcttgg

SEQ ID NO: 118958 - DNA, 20 bp, Artificial Sequence
  primer
agcctagtcctgccctgttc

SEQ ID NO: 118959 - DNA, 21 bp, Artificial Sequence
  primer
cctccaccagggtttactgac

SEQ ID NO: 118960 - DNA, 36 bp, Artificial Sequence
  primer
gtaaaacgacggccagtggcagcctctaggctcttg

SEQ ID NO: 118961 - DNA, 38 bp, Artificial Sequence
  primer
gtaaaacgacggccagtggaaacaccttcttgtggagg

SEQ ID NO: 118962 - DNA, 21 bp, Artificial Sequence
  primer
tagcccaaatacactggcagg

SEQ ID NO: 118963 - DNA, 38 bp, Artificial Sequence
  primer
gtaaaacgacggccagtttacaagcgtctgggacaatg

SEQ ID NO: 118964 - DNA, 38 bp, Artificial Sequence
  primer
gtaaaacgacggccagtgttcactttgctcgtagcctg

SEQ ID NO: 118965 - DNA, 38 bp, Artificial Sequence
  primer
gtaaaacgacggccagtcttagcatgatgtctggcacg

SEQ ID NO: 118966 - DNA, 21 bp, Artificial Sequence
  primer
tgattggaatgcttgaggttg

SEQ ID NO: 118967 - DNA, 38 bp, Artificial Sequence
  primer
gtaaaacgacggccagtctggaaatactgcaacatggc

SEQ ID NO: 118968 - DNA, 36 bp, Artificial Sequence
  primer
gtaaaacgacggccagttcccatgggtaagcgtttg

SEQ ID NO: 118969 - DNA, 44 bp, Artificial Sequence
  primer
gtaaaacgacggccagtgagcttaaattgtatattgaaagtggg

SEQ ID NO: 118970 - DNA, 21 bp, Artificial Sequence
  primer
catttgagactgggcaaacac

SEQ ID NO: 118971 - DNA, 24 bp, Artificial Sequence
  primer
tttaaatgtttgctttccttccac

SEQ ID NO: 118972 - DNA, 24 bp, Artificial Sequence
  primer
tggtgtaattgtttgaattatggg

SEQ ID NO: 118973 - DNA, 22 bp, Artificial Sequence
  primer
ccactttagccaatatgcatcc

SEQ ID NO: 118974 - DNA, 22 bp, Artificial Sequence
  primer
tggtcaccctaagatctcctcc

SEQ ID NO: 118975 - DNA, 21 bp, Artificial Sequence
  primer
gggtttctgggagaggatgag

SEQ ID NO: 118976 - DNA, 38 bp, Artificial Sequence
  primer
gtaaaacgacggccagtgggaggaacatgaggtctgag

SEQ ID NO: 118977 - DNA, 38 bp, Artificial Sequence
  primer
gtaaaacgacggccagtctctgtgtctgatgacggagg

SEQ ID NO: 118978 - DNA, 21 bp, Artificial Sequence
  primer
ccagagcctccactctacctg

SEQ ID NO: 118979 - DNA, 21 bp, Artificial Sequence
  primer
tcaaatggagaactgtgtggc

SEQ ID NO: 118980 - DNA, 21 bp, Artificial Sequence
  primer
ggaagttgacacaggtttggg

SEQ ID NO: 118981 - DNA, 21 bp, Artificial Sequence
  primer
atgattcccatcatccctcag

SEQ ID NO: 118982 - DNA, 38 bp, Artificial Sequence
  primer
gtaaaacgacggccagtccgagtgcttcgttagaattg

SEQ ID NO: 118983 - DNA, 39 bp, Artificial Sequence
  primer
gtaaaacgacggccagtttattgcctttctcattctgcc

SEQ ID NO: 118984 - DNA, 36 bp, Artificial Sequence
  primer
gtaaaacgacggccagtaggaaggagcgagtcccac

SEQ ID NO: 118985 - DNA, 22 bp, Artificial Sequence
  primer
gcaaatgcatggtacaaagatg

SEQ ID NO: 118986 - DNA, 20 bp, Artificial Sequence
  primer
ggtgatctcctgacctcgtg

SEQ ID NO: 118987 - DNA, 20 bp, Artificial Sequence
  primer
tctgcctcataccctcatcc

SEQ ID NO: 118988 - DNA, 38 bp, Artificial Sequence
  primer
gtaaaacgacggccagttagtgcacaggaggcagaagt

SEQ ID NO: 118989 - DNA, 24 bp, Artificial Sequence
  primer
cacttactggtgtccttatggttg

SEQ ID NO: 118990 - DNA, 38 bp, Artificial Sequence
  primer
gtaaaacgacggccagtcctattgttcagaccaccacg

SEQ ID NO: 118991 - DNA, 37 bp, Artificial Sequence
  primer
gtaaaacgacggccagtctaggcgcatggttctttgt

SEQ ID NO: 118992 - DNA, 21 bp, Artificial Sequence
  primer
accatcgagggtagcacagtc

SEQ ID NO: 118993 - DNA, 25 bp, Artificial Sequence
  primer
ttccttgattggtagcatttagttg

SEQ ID NO: 118994 - DNA, 24 bp, Artificial Sequence
  primer
ccatttaaagactgtacaattgcc

SEQ ID NO: 118995 - DNA, 43 bp, Artificial Sequence
  primer
gtaaaacgacggccagttgcttatttcacacagaatatcaatg

SEQ ID NO: 118996 - DNA, 36 bp, Artificial Sequence
  primer
gtaaaacgacggccagtcactcaccgtctccttggc

SEQ ID NO: 118997 - DNA, 37 bp, Artificial Sequence
  primer
gtaaaacgacggccagtctcacgggaagttcctcacc

SEQ ID NO: 118998 - DNA, 21 bp, Artificial Sequence
  primer
actgctccatccattcacaag

SEQ ID NO: 118999 - DNA, 21 bp, Artificial Sequence
  primer
tttcaccagcccttagaaacg

SEQ ID NO: 119000 - DNA, 20 bp, Artificial Sequence
  primer
gggtggaattacccaagagc

SEQ ID NO: 119001 - DNA, 41 bp, Artificial Sequence
  primer
gtaaaacgacggccagtagaacctaagatctgctttccaag

SEQ ID NO: 119002 - DNA, 42 bp, Artificial Sequence
  primer
gtaaaacgacggccagtacagtagtactcccaataaggcaaa

SEQ ID NO: 119003 - DNA, 44 bp, Artificial Sequence
  primer
gtaaaacgacggccagtcaaatctcacagataacaatatggatg

SEQ ID NO: 119004 - DNA, 21 bp, Artificial Sequence
  primer
ggcttcattgcacctattgtg

SEQ ID NO: 119005 - DNA, 25 bp, Artificial Sequence
  primer
ttcaactgtcaaagctgatgtattc

SEQ ID NO: 119006 - DNA, 36 bp, Artificial Sequence
  primer
gtaaaacgacggccagtcggccgatatctggaattt

SEQ ID NO: 119007 - DNA, 21 bp, Artificial Sequence
  primer
gccagagcatttaggacacag

SEQ ID NO: 119008 - DNA, 39 bp, Artificial Sequence
  primer
gtaaaacgacggccagtctttcacacaagttgatgggtg

SEQ ID NO: 119009 - DNA, 23 bp, Artificial Sequence
  primer
tttaagggaagtaaggcctatgt

SEQ ID NO: 119010 - DNA, 26 bp, Artificial Sequence
  primer
aacagtaacaaatattctttgggtgc

SEQ ID NO: 119011 - DNA, 24 bp, Artificial Sequence
  primer
ccttgtgatttgtctcttcaaacc

SEQ ID NO: 119012 - DNA, 38 bp, Artificial Sequence
  primer
gtaaaacgacggccagtcataaggaacgttgagttgcc

SEQ ID NO: 119013 - DNA, 18 bp, Artificial Sequence
  primer
gggtgggaaggagattgg

SEQ ID NO: 119014 - DNA, 20 bp, Artificial Sequence
  primer
tgcaacaatcccatctttcc

SEQ ID NO: 119015 - DNA, 19 bp, Artificial Sequence
  primer
acatgggcaacagagaccc

SEQ ID NO: 119016 - DNA, 23 bp, Artificial Sequence
  primer
agataggatgggtgtcagaagtg

SEQ ID NO: 119017 - DNA, 21 bp, Artificial Sequence
  primer
ctttcctggaatcccaaattc

SEQ ID NO: 119018 - DNA, 22 bp, Artificial Sequence
  primer
aggagatggtgagcttaactgc

SEQ ID NO: 119019 - DNA, 38 bp, Artificial Sequence
  primer
gtaaaacgacggccagtacacaaacaaacagtgggctg

SEQ ID NO: 119020 - DNA, 22 bp, Artificial Sequence
  primer
ggagttcaagggcaagtaggac

SEQ ID NO: 119021 - DNA, 38 bp, Artificial Sequence
  primer
gtaaaacgacggccagtttatatgtgggcctctcctcc

SEQ ID NO: 119022 - DNA, 22 bp, Artificial Sequence
  primer
gatgtcacaaccaagttgagga

SEQ ID NO: 119023 - DNA, 39 bp, Artificial Sequence
  primer
gtaaaacgacggccagtgcaacacatacaggcatatgag

SEQ ID NO: 119024 - DNA, 21 bp, Artificial Sequence
  primer
ggacagaagacgtgtttggag

SEQ ID NO: 119025 - DNA, 38 bp, Artificial Sequence
  primer
gtaaaacgacggccagtgagccctttggaaattctgtg

SEQ ID NO: 119026 - DNA, 22 bp, Artificial Sequence
  primer
gcaggacagattaccaatgtcc

SEQ ID NO: 119027 - DNA, 39 bp, Artificial Sequence
  primer
gtaaaacgacggccagtacctgtaacccttgatgaaagc

SEQ ID NO: 119028 - DNA, 21 bp, Artificial Sequence
  primer
gggcaagtaaaggaggaaagc

SEQ ID NO: 119029 - DNA, 44 bp, Artificial Sequence
  primer
gtaaaacgacggccagttgattatcagttagattgagggtcttc

SEQ ID NO: 119030 - DNA, 44 bp, Artificial Sequence
  primer
gtaaaacgacggccagtaacacataactctgacagctgttaatc

SEQ ID NO: 119031 - DNA, 23 bp, Artificial Sequence
  primer
ttgattaggaaggcgattaacac

SEQ ID NO: 119032 - DNA, 24 bp, Artificial Sequence
  primer
gctattacattgacacagggaacc

SEQ ID NO: 119033 - DNA, 21 bp, Artificial Sequence
  primer
tgaacatcctaaatctggccc

SEQ ID NO: 119034 - DNA, 39 bp, Artificial Sequence
  primer
gtaaaacgacggccagtcaccctaaataaggcaccaatc

SEQ ID NO: 119035 - DNA, 21 bp, Artificial Sequence
  primer
tgttacctttgagggtcctgc

SEQ ID NO: 119036 - DNA, 28 bp, Artificial Sequence
  primer
tttacactgaagactcctactttctcaa

SEQ ID NO: 119037 - DNA, 38 bp, Artificial Sequence
  primer
gtaaaacgacggccagtcactgccagcaggttagacag

SEQ ID NO: 119038 - DNA, 21 bp, Artificial Sequence
  primer
gtggctaacactcagccttcc

SEQ ID NO: 119039 - DNA, 40 bp, Artificial Sequence
  primer
gtaaaacgacggccagtaacacacaacattccaaacagtg

SEQ ID NO: 119040 - DNA, 25 bp, Artificial Sequence
  primer
cacaatctcacaagagaagagtacg

SEQ ID NO: 119041 - DNA, 38 bp, Artificial Sequence
  primer
gtaaaacgacggccagtagcctagcatttgaaactcca

SEQ ID NO: 119042 - DNA, 38 bp, Artificial Sequence
  primer
gtaaaacgacggccagtgagctgcgtgacatctgtttc

SEQ ID NO: 119043 - DNA, 19 bp, Artificial Sequence
  primer
aggtctcccagccctaagc

SEQ ID NO: 119044 - DNA, 38 bp, Artificial Sequence
  primer
gtaaaacgacggccagttgcacaatgtacaactggtgg

SEQ ID NO: 119045 - DNA, 21 bp, Artificial Sequence
  primer
tgctcttgtccctctgttctc

SEQ ID NO: 119046 - DNA, 47 bp, Artificial Sequence
  primer
gtaaaacgacggccagtaggtgtttgtgctaaatagtagagtatgag

SEQ ID NO: 119047 - DNA, 42 bp, Artificial Sequence
  primer
gtaaaacgacggccagtgggtaaatcaagggtaattaaaggg

SEQ ID NO: 119048 - DNA, 38 bp, Artificial Sequence
  primer
gtaaaacgacggccagtaacacaaatgcccagaaacac

SEQ ID NO: 119049 - DNA, 22 bp, Artificial Sequence
  primer
aacagtacgtcggcaatgtaac

SEQ ID NO: 119050 - DNA, 19 bp, Artificial Sequence
  primer
gacttcggaccagaaagcc

SEQ ID NO: 119051 - DNA, 22 bp, Artificial Sequence
  primer
gcaggttagatacgcaaacagc

SEQ ID NO: 119052 - DNA, 21 bp, Artificial Sequence
  primer
gaccctcctggtctgtttctg

SEQ ID NO: 119053 - DNA, 21 bp, Artificial Sequence
  primer
ccgacagcagtgatgaagatg

SEQ ID NO: 119054 - DNA, 18 bp, Artificial Sequence
  primer
cgggtctcgatctggaag

SEQ ID NO: 119055 - DNA, 38 bp, Artificial Sequence
  primer
gtaaaacgacggccagttcattcattgacaaagggtgg

SEQ ID NO: 119056 - DNA, 38 bp, Artificial Sequence
  primer
gtaaaacgacggccagtgggacctattaacttcgcacc

SEQ ID NO: 119057 - DNA, 38 bp, Artificial Sequence
  primer
gtaaaacgacggccagtcagacacaggcaaggattcag

SEQ ID NO: 119058 - DNA, 39 bp, Artificial Sequence
  primer
gtaaaacgacggccagtccctcctacctcggtcatctac

SEQ ID NO: 119059 - DNA, 38 bp, Artificial Sequence
  primer
gtaaaacgacggccagttctgctgctggactctacacc

SEQ ID NO: 119060 - DNA, 21 bp, Artificial Sequence
  primer
gggctgtaagtatgagtgggc

SEQ ID NO: 119061 - DNA, 21 bp, Artificial Sequence
  primer
atttgtactggctctcagccc

SEQ ID NO: 119062 - DNA, 21 bp, Artificial Sequence
  primer
atagcttatgcctgtggtggg

SEQ ID NO: 119063 - DNA, 17 bp, Artificial Sequence
  primer
cgaaaagggcgagtccc

SEQ ID NO: 119064 - DNA, 17 bp, Artificial Sequence
  primer
gtggtcccgcccacttc

SEQ ID NO: 119065 - DNA, 38 bp, Artificial Sequence
  primer
gtaaaacgacggccagtcctgtcctggctcttctgaac

SEQ ID NO: 119066 - DNA, 19 bp, Artificial Sequence
  primer
ctatttggtctcggaggcg

SEQ ID NO: 119067 - DNA, 21 bp, Artificial Sequence
  primer
gtttcctagacgcccacagag

SEQ ID NO: 119068 - DNA, 19 bp, Artificial Sequence
  primer
cctcctccctggtctcagc

SEQ ID NO: 119069 - DNA, 21 bp, Artificial Sequence
  primer
cacgttgatcttcacattggg

SEQ ID NO: 119070 - DNA, 38 bp, Artificial Sequence
  primer
gtaaaacgacggccagtgggtaggaagtatcagtgccc

SEQ ID NO: 119071 - DNA, 21 bp, Artificial Sequence
  primer
acacagatgtatggtgcaggc

SEQ ID NO: 119072 - DNA, 19 bp, Artificial Sequence
  primer
ggctcaaacaaaggagccc

SEQ ID NO: 119073 - DNA, 19 bp, Artificial Sequence
  primer
cttccaggcctctccttcc

SEQ ID NO: 119074 - DNA, 38 bp, Artificial Sequence
  primer
gtaaaacgacggccagtgatggtgcagtagaagctccc

SEQ ID NO: 119075 - DNA, 38 bp, Artificial Sequence
  primer
gtaaaacgacggccagtatcttgtcggtctgaattggc

SEQ ID NO: 119076 - DNA, 21 bp, Artificial Sequence
  primer
gaagcagttggtctaggcagc

SEQ ID NO: 119077 - DNA, 39 bp, Artificial Sequence
  primer
gtaaaacgacggccagtagtccagctctctgcaattctc

SEQ ID NO: 119078 - DNA, 21 bp, Artificial Sequence
  primer
gccaatattgttcccatttgc

SEQ ID NO: 119079 - DNA, 39 bp, Artificial Sequence
  primer
gtaaaacgacggccagtaacatgcaaacatgcagagaag

SEQ ID NO: 119080 - DNA, 38 bp, Artificial Sequence
  primer
gtaaaacgacggccagtgaggcaggaacaagtttaggc

SEQ ID NO: 119081 - DNA, 18 bp, Artificial Sequence
  primer
ctcctccgaagacctccc

SEQ ID NO: 119082 - DNA, 21 bp, Artificial Sequence
  primer
gcaccacttagaagctcccac

SEQ ID NO: 119083 - DNA, 38 bp, Artificial Sequence
  primer
gtaaaacgacggccagtccaagaatggcctggatactg

SEQ ID NO: 119084 - DNA, 21 bp, Artificial Sequence
  primer
gacacacagcagatttcaggc

SEQ ID NO: 119085 - DNA, 37 bp, Artificial Sequence
  primer
gtaaaacgacggccagtcgggcactcagaccttgtag

SEQ ID NO: 119086 - DNA, 21 bp, Artificial Sequence
  primer
ctgctgtccatcagtgtccag

SEQ ID NO: 119087 - DNA, 21 bp, Artificial Sequence
  primer
gtagcacagggtcccaaattc

SEQ ID NO: 119088 - DNA, 38 bp, Artificial Sequence
  primer
gtaaaacgacggccagttcggcaacattagcaccatac

SEQ ID NO: 119089 - DNA, 40 bp, Artificial Sequence
  primer
gtaaaacgacggccagtgactcactgacagcaaagattcc

SEQ ID NO: 119090 - DNA, 38 bp, Artificial Sequence
  primer
gtaaaacgacggccagtaccttctcgtagtgagggcag

SEQ ID NO: 119091 - DNA, 39 bp, Artificial Sequence
  primer
gtaaaacgacggccagtgcttcagtcaattctccagcac

SEQ ID NO: 119092 - DNA, 38 bp, Artificial Sequence
  primer
gtaaaacgacggccagtgagtctggctcccaagatcac

SEQ ID NO: 119093 - DNA, 20 bp, Artificial Sequence
  primer
gtgtgaacactgcctgaggg

SEQ ID NO: 119094 - DNA, 38 bp, Artificial Sequence
  primer
gtaaaacgacggccagtgtctctttccatgggcatttc

SEQ ID NO: 119095 - DNA, 38 bp, Artificial Sequence
  primer
gtaaaacgacggccagttcctctttcctgtatcaccgc

SEQ ID NO: 119096 - DNA, 38 bp, Artificial Sequence
  primer
gtaaaacgacggccagtaggatagccacgtgagaggag

SEQ ID NO: 119097 - DNA, 38 bp, Artificial Sequence
  primer
gtaaaacgacggccagtccgagatgttagaggtgtccc

SEQ ID NO: 119098 - DNA, 21 bp, Artificial Sequence
  primer
cctcctggagaagaaagggac

SEQ ID NO: 119099 - DNA, 38 bp, Artificial Sequence
  primer
gtaaaacgacggccagtcagagcagtgaagagctgtgg

SEQ ID NO: 119100 - DNA, 38 bp, Artificial Sequence
  primer
gtaaaacgacggccagtacatcgtagacctgcggaaag

SEQ ID NO: 119101 - DNA, 38 bp, Artificial Sequence
  primer
gtaaaacgacggccagtcagaggcacatcgtagatccc

SEQ ID NO: 119102 - DNA, 21 bp, Artificial Sequence
  primer
ggaatgccctcgtactcattg

SEQ ID NO: 119103 - DNA, 38 bp, Artificial Sequence
  primer
gtaaaacgacggccagtctctgtgccctaggtctccac

SEQ ID NO: 119104 - DNA, 38 bp, Artificial Sequence
  primer
gtaaaacgacggccagttgatggctcagttcttctccc

SEQ ID NO: 119105 - DNA, 38 bp, Artificial Sequence
  primer
gtaaaacgacggccagtacacactgcaccatctcttgg

SEQ ID NO: 119106 - DNA, 38 bp, Artificial Sequence
  primer
gtaaaacgacggccagtttaacaaagccttccagccac

SEQ ID NO: 119107 - DNA, 38 bp, Artificial Sequence
  primer
gtaaaacgacggccagtcaggcttccctaacatcacac

SEQ ID NO: 119108 - DNA, 38 bp, Artificial Sequence
  primer
gtaaaacgacggccagtggtgtatcatttgcttgctgc

SEQ ID NO: 119109 - DNA, 21 bp, Artificial Sequence
  primer
ggacagcctgactctgacaac

SEQ ID NO: 119110 - DNA, 39 bp, Artificial Sequence
  primer
gtaaaacgacggccagttgcctaaagtcagtcagttccc

SEQ ID NO: 119111 - DNA, 21 bp, Artificial Sequence
  primer
ctgtagcaacggctcataccc

SEQ ID NO: 119112 - DNA, 21 bp, Artificial Sequence
  primer
tgtatattgacggcaaatggc

SEQ ID NO: 119113 - DNA, 21 bp, Artificial Sequence
  primer
atccctcatgaactcacctgc

SEQ ID NO: 119114 - DNA, 38 bp, Artificial Sequence
  primer
gtaaaacgacggccagtttaaattgcttccaagccctg

SEQ ID NO: 119115 - DNA, 25 bp, Artificial Sequence
  primer
tttggattgaatgttatttccagag

SEQ ID NO: 119116 - DNA, 38 bp, Artificial Sequence
  primer
gtaaaacgacggccagtgcaaactagcgttcagcaaac

SEQ ID NO: 119117 - DNA, 38 bp, Artificial Sequence
  primer
gtaaaacgacggccagtatgaattctgggttgaggagg

SEQ ID NO: 119118 - DNA, 21 bp, Artificial Sequence
  primer
attagtgccaagaatgccctc

SEQ ID NO: 119119 - DNA, 23 bp, Artificial Sequence
  primer
ccaacaagataatcaccagtccc

SEQ ID NO: 119120 - DNA, 22 bp, Artificial Sequence
  primer
gcaagaaactgatctccatgtg

SEQ ID NO: 119121 - DNA, 22 bp, Artificial Sequence
  primer
aaccatggcatgttcctaagac

SEQ ID NO: 119122 - DNA, 25 bp, Artificial Sequence
  primer
cgcagtctaagttcaactggtttag

SEQ ID NO: 119123 - DNA, 21 bp, Artificial Sequence
  primer
ctccctgttaggtgttgctcc

SEQ ID NO: 119124 - DNA, 37 bp, Artificial Sequence
  primer
gtaaaacgacggccagtgccagatcacttgctccttg

SEQ ID NO: 119125 - DNA, 21 bp, Artificial Sequence
  primer
taccagattgaaccaacaggg

SEQ ID NO: 119126 - DNA, 21 bp, Artificial Sequence
  primer
tgcctatatttggcagacacg

SEQ ID NO: 119127 - DNA, 38 bp, Artificial Sequence
  primer
gtaaaacgacggccagtaagagggctttggtctcagtg

SEQ ID NO: 119128 - DNA, 41 bp, Artificial Sequence
  primer
gtaaaacgacggccagtggcctaaaccactataccagttcc

SEQ ID NO: 119129 - DNA, 37 bp, Artificial Sequence
  primer
gtaaaacgacggccagtattgtctggctcaagcaggt

SEQ ID NO: 119130 - DNA, 38 bp, Artificial Sequence
  primer
gtaaaacgacggccagttttccactgagtctctggctg

SEQ ID NO: 119131 - DNA, 21 bp, Artificial Sequence
  primer
accaacccagatcatagccac

SEQ ID NO: 119132 - DNA, 22 bp, Artificial Sequence
  primer
gcccttgctcataagttagacg

SEQ ID NO: 119133 - DNA, 26 bp, Artificial Sequence
  primer
aaaccataagcagttaactttccatc

SEQ ID NO: 119134 - DNA, 21 bp, Artificial Sequence
  primer
taggccaggtcatttgttagg

SEQ ID NO: 119135 - DNA, 38 bp, Artificial Sequence
  primer
gtaaaacgacggccagtttcaaagtggaagatgaagcc

SEQ ID NO: 119136 - DNA, 23 bp, Artificial Sequence
  primer
gaggaattcatgctgaagatttg

SEQ ID NO: 119137 - DNA, 21 bp, Artificial Sequence
  primer
ttccatattcacccatacggc

SEQ ID NO: 119138 - DNA, 38 bp, Artificial Sequence
  primer
gtaaaacgacggccagtgccaactgcatgacatcaaac

SEQ ID NO: 119139 - DNA, 27 bp, Artificial Sequence
  primer
aataaacaaacaaattcttagcattcc

SEQ ID NO: 119140 - DNA, 39 bp, Artificial Sequence
  primer
gtaaaacgacggccagttccaaggtttggtttcattagc

SEQ ID NO: 119141 - DNA, 24 bp, Artificial Sequence
  primer
gacttgaactcaaattcatgcttc

SEQ ID NO: 119142 - DNA, 21 bp, Artificial Sequence
  primer
tacgtcagtttgagcaggtcg

SEQ ID NO: 119143 - DNA, 38 bp, Artificial Sequence
  primer
gtaaaacgacggccagtccatttcaaattctcaagccc

SEQ ID NO: 119144 - DNA, 21 bp, Artificial Sequence
  primer
catgcaatgaagtgcacacac

SEQ ID NO: 119145 - DNA, 39 bp, Artificial Sequence
  primer
gtaaaacgacggccagtcatctcaaggagacaggcattc

SEQ ID NO: 119146 - DNA, 22 bp, Artificial Sequence
  primer
ggtcttggctaacactgacacc

SEQ ID NO: 119147 - DNA, 21 bp, Artificial Sequence
  primer
actccagtgcaaatcaggtcc

SEQ ID NO: 119148 - DNA, 21 bp, Artificial Sequence
  primer
tctccaggcattgagtaggtg

SEQ ID NO: 119149 - DNA, 37 bp, Artificial Sequence
  primer
gtaaaacgacggccagtcaaggtgatggaccacttgc

SEQ ID NO: 119150 - DNA, 38 bp, Artificial Sequence
  primer
gtaaaacgacggccagtcctgtaaatggtgggtgacag

SEQ ID NO: 119151 - DNA, 36 bp, Artificial Sequence; identical to SEQ ID NO: 41824
  primer

SEQ ID NO: 119152 - DNA, 42 bp, Artificial Sequence
  primer
gtaaaacgacggccagtcatgtgaactgttgttcagactctt

SEQ ID NO: 119153 - DNA, 38 bp, Artificial Sequence
  primer
gtaaaacgacggccagtgaccgttcttgttcgtctgag

SEQ ID NO: 119154 - DNA, 27 bp, Artificial Sequence
  primer
aaattaataccacaacaattaacccaa

SEQ ID NO: 119155 - DNA, 44 bp, Artificial Sequence
  primer
gtaaaacgacggccagttggctaagattaataagagcatttgaa

SEQ ID NO: 119156 - DNA, 41 bp, Artificial Sequence
  primer
gtaaaacgacggccagttgttaaacacgtcagttaaaggaa

SEQ ID NO: 119157 - DNA, 43 bp, Artificial Sequence
  primer
gtaaaacgacggccagtagactgttgagaatttgtttacgaag

SEQ ID NO: 119158 - DNA, 29 bp, Artificial Sequence
  primer
tctatacagatatattccttcttccctcc

SEQ ID NO: 119159 - DNA, 38 bp, Artificial Sequence
  primer
gtaaaacgacggccagtttcctcctggtaatgggtgtg

SEQ ID NO: 119160 - DNA, 21 bp, Artificial Sequence
  primer
tggaacccacattggatactg

SEQ ID NO: 119161 - DNA, 21 bp, Artificial Sequence
  primer
tccttcccttctctcatggtc

SEQ ID NO: 119162 - DNA, 21 bp, Artificial Sequence
  primer
catctggttaggcagagggag

SEQ ID NO: 119163 - DNA, 21 bp, Artificial Sequence
  primer
cacagtgcctgagatctgctc

SEQ ID NO: 119164 - DNA, 18 bp, Artificial Sequence
  primer
gtgagctgagactgcgcc

SEQ ID NO: 119165 - DNA, 40 bp, Artificial Sequence
  primer
gtaaaacgacggccagtcacagatgctctataccacaccc

SEQ ID NO: 119166 - DNA, 21 bp, Artificial Sequence
  primer
atttcagagtttgtggcctgg

SEQ ID NO: 119167 - DNA, 22 bp, Artificial Sequence
  primer
tctctacagctccatctcaccc

SEQ ID NO: 119168 - DNA, 20 bp, Artificial Sequence
  primer
ctagagttggccaggcagtc

SEQ ID NO: 119169 - DNA, 38 bp, Artificial Sequence
  primer
gtaaaacgacggccagtcagacactcatggcaggtcag

SEQ ID NO: 119170 - DNA, 20 bp, Artificial Sequence
  primer
agggcagagaagcaaagagg

SEQ ID NO: 119171 - DNA, 36 bp, Artificial Sequence
  primer
gtaaaacgacggccagtatgctggttccacaggagg

SEQ ID NO: 119172 - DNA, 38 bp, Artificial Sequence
  primer
gtaaaacgacggccagtcctagagctgcatgagaggac

SEQ ID NO: 119173 - DNA, 38 bp, Artificial Sequence
  primer
gtaaaacgacggccagtgtcagaccagtcctgaccctc

SEQ ID NO: 119174 - DNA, 37 bp, Artificial Sequence
  primer
gtaaaacgacggccagtagggtcagggtctgaggatg

SEQ ID NO: 119175 - DNA, 21 bp, Artificial Sequence
  primer
cccacttcaggtggtgagttc

SEQ ID NO: 119176 - DNA, 37 bp, Artificial Sequence
  primer
gtaaaacgacggccagtggatgacaagggactcaggg

SEQ ID NO: 119177 - DNA, 38 bp, Artificial Sequence
  primer
gtaaaacgacggccagtcaggctagggtcaggacaaag

SEQ ID NO: 119178 - DNA, 20 bp, Artificial Sequence
  primer
cctttgggctgtcctttacc

SEQ ID NO: 119179 - DNA, 21 bp, Artificial Sequence
  primer
acaacagtgtgacccaggatg

SEQ ID NO: 119180 - DNA, 21 bp, Artificial Sequence
  primer
gggagtgggcagttagttgtg

SEQ ID NO: 119181 - DNA, 38 bp, Artificial Sequence
  primer
gtaaaacgacggccagtctctcctccaaatcagggatg

SEQ ID NO: 119182 - DNA, 21 bp, Artificial Sequence
  primer
cctgtcagagctgtcctctgc

SEQ ID NO: 119183 - DNA, 38 bp, Artificial Sequence
  primer
gtaaaacgacggccagtgataatccagaagagcgggag

SEQ ID NO: 119184 - DNA, 39 bp, Artificial Sequence
  primer
gtaaaacgacggccagtcctgaaccagacggtatactcc

SEQ ID NO: 119185 - DNA, 21 bp, Artificial Sequence
  primer
gaactcggtggttcctgagac

SEQ ID NO: 119186 - DNA, 36 bp, Artificial Sequence
  primer
gtaaaacgacggccagttccctcagacccaggagac

SEQ ID NO: 119187 - DNA, 21 bp, Artificial Sequence
  primer
agatggtggaagaaaggtccc

SEQ ID NO: 119188 - DNA, 38 bp, Artificial Sequence
  primer
gtaaaacgacggccagttggcccagtatccctatgttc

SEQ ID NO: 119189 - DNA, 38 bp, Artificial Sequence
  primer
gtaaaacgacggccagtaggcctcatccattactgctc

SEQ ID NO: 119190 - DNA, 38 bp, Artificial Sequence
  primer
gtaaaacgacggccagtatctgtccctggcttatcagg

SEQ ID NO: 119191 - DNA, 19 bp, Artificial Sequence
  primer
acccaagggtccaggtctc

SEQ ID NO: 119192 - DNA, 21 bp, Artificial Sequence
  primer
cagctccttccctaccctgac

SEQ ID NO: 119193 - DNA, 21 bp, Artificial Sequence
  primer
ttggaaccatgttgtcagtcc

SEQ ID NO: 119194 - DNA, 22 bp, Artificial Sequence
  primer
tggctggatgtgtacagtatgg

SEQ ID NO: 119195 - DNA, 21 bp, Artificial Sequence
  primer
gtgtgggtaggtgatgaccag

SEQ ID NO: 119196 - DNA, 21 bp, Artificial Sequence
  primer
cttccagaggagcacacagag

SEQ ID NO: 119197 - DNA, 18 bp, Artificial Sequence
  primer
aggaagggctcagagcgg

SEQ ID NO: 119198 - DNA, 37 bp, Artificial Sequence
  primer
gtaaaacgacggccagtagctgctgtggatgagaacc

SEQ ID NO: 119199 - DNA, 38 bp, Artificial Sequence
  primer
gtaaaacgacggccagtaacctcgtctcttggttcctg

SEQ ID NO: 119200 - DNA, 38 bp, Artificial Sequence
  primer
gtaaaacgacggccagttatccaggttaaatcccgtcg

SEQ ID NO: 119201 - DNA, 21 bp, Artificial Sequence
  primer
ttatgcatgtccttgcctgag

SEQ ID NO: 119202 - DNA, 38 bp, Artificial Sequence
  primer
gtaaaacgacggccagtcctgcgtaccatattgagtcg

SEQ ID NO: 119203 - DNA, 20 bp, Artificial Sequence
  primer
gcagtgagctcagattgcac

SEQ ID NO: 119204 - DNA, 40 bp, Artificial Sequence
  primer
gtaaaacgacggccagtcaacaagctgattgtgatgaatg

SEQ ID NO: 119205 - DNA, 21 bp, Artificial Sequence
  primer
ttggaattccctaaatgccag

SEQ ID NO: 119206 - DNA, 21 bp, Artificial Sequence
  primer
caaagaagagaaggctgaggc

SEQ ID NO: 119207 - DNA, 21 bp, Artificial Sequence
  primer
tgtcttctttcatttgccagg

SEQ ID NO: 119208 - DNA, 37 bp, Artificial Sequence
  primer
gtaaaacgacggccagtgggtttacgaatgaagcagg

SEQ ID NO: 119209 - DNA, 39 bp, Artificial Sequence
  primer
gtaaaacgacggccagttgggaataacaacccatcactc

SEQ ID NO: 119210 - DNA, 42 bp, Artificial Sequence
  primer
gtaaaacgacggccagttcttatcgttgtatccttaatgcct

SEQ ID NO: 119211 - DNA, 38 bp, Artificial Sequence
  primer
gtaaaacgacggccagtatgccagaggtcctatgatgc

SEQ ID NO: 119212 - DNA, 38 bp, Artificial Sequence
  primer
gtaaaacgacggccagtaagaatgatgggaacatgtgg

SEQ ID NO: 119213 - DNA, 38 bp, Artificial Sequence
  primer
gtaaaacgacggccagtctcagtttcccatcttgggtc

SEQ ID NO: 119214 - DNA, 20 bp, Artificial Sequence
  primer
ctgctagggagtgggtgctc

SEQ ID NO: 119215 - DNA, 21 bp, Artificial Sequence
  primer
tcatccacatctgcaggaaac

SEQ ID NO: 119216 - DNA, 21 bp, Artificial Sequence
  primer
gttctcgggaacccacctatc

SEQ ID NO: 119217 - DNA, 20 bp, Artificial Sequence
  primer
cctccacacctcacctcctc

SEQ ID NO: 119218 - DNA, 37 bp, Artificial Sequence
  primer
gtaaaacgacggccagtcagctagatctgactggccc

SEQ ID NO: 119219 - DNA, 22 bp, Artificial Sequence
  primer
ggtggattcacagagaagatcc

SEQ ID NO: 119220 - DNA, 21 bp, Artificial Sequence
  primer
ccacttccctcaagaggctac

SEQ ID NO: 119221 - DNA, 38 bp, Artificial Sequence
  primer
gtaaaacgacggccagtcacataacgcggtacatggtc

SEQ ID NO: 119222 - DNA, 21 bp, Artificial Sequence
  primer
gatggctgaggacagaggaag

SEQ ID NO: 119223 - DNA, 21 bp, Artificial Sequence
  primer
ctggtcctacattcatccacg

SEQ ID NO: 119224 - DNA, 38 bp, Artificial Sequence
  primer
gtaaaacgacggccagtcaagagtgtgaccactacccg

SEQ ID NO: 119225 - DNA, 38 bp, Artificial Sequence
  primer
gtaaaacgacggccagtcggcccactagaaaggaagag

SEQ ID NO: 119226 - DNA, 21 bp, Artificial Sequence
  primer
gcttggaggaaagagggaatg

SEQ ID NO: 119227 - DNA, 21 bp, Artificial Sequence
  primer
ttatctgcagctcacagtcgg

SEQ ID NO: 119228 - DNA, 21 bp, Artificial Sequence
  primer
gtaactgagcggactcaaccc

SEQ ID NO: 119229 - DNA, 21 bp, Artificial Sequence
  primer
tcagccataggagtgatgagg

SEQ ID NO: 119230 - DNA, 24 bp, Artificial Sequence
  primer
gggttatgttgaggatcaattcag

SEQ ID NO: 119231 - DNA, 21 bp, Artificial Sequence
  primer
taggaacactttggcatgcag

SEQ ID NO: 119232 - DNA, 37 bp, Artificial Sequence
  primer
gtaaaacgacggccagtgcaccacctccttcactgag

SEQ ID NO: 119233 - DNA, 38 bp, Artificial Sequence
  primer
gtaaaacgacggccagttcacagtgctgtggtctttcc

SEQ ID NO: 119234 - DNA, 20 bp, Artificial Sequence
  primer
gtggtgagaacggaccactc

SEQ ID NO: 119235 - DNA, 37 bp, Artificial Sequence
  primer
gtaaaacgacggccagtaggaaacaggaaaggacggg

SEQ ID NO: 119236 - DNA, 21 bp, Artificial Sequence
  primer
acttcaagtggaattctgccc

SEQ ID NO: 119237 - DNA, 21 bp, Artificial Sequence
  primer
aattgagtgacaagctcgctg

SEQ ID NO: 119238 - DNA, 24 bp, Artificial Sequence
  primer
tctatgtccgtggtaaatacatgc

SEQ ID NO: 119239 - DNA, 20 bp, Artificial Sequence
  primer
actgcatgcggtgagatttg

SEQ ID NO: 119240 - DNA, 22 bp, Artificial Sequence
  primer
ggaagtcttctgtcctggtgtg

SEQ ID NO: 119241 - DNA, 38 bp, Artificial Sequence
  primer
gtaaaacgacggccagttccaagatgggatactccagg

SEQ ID NO: 119242 - DNA, 38 bp, Artificial Sequence
  primer
gtaaaacgacggccagtgatgtgttcctttggaggtgg

SEQ ID NO: 119243 - DNA, 39 bp, Artificial Sequence
  primer
gtaaaacgacggccagtggatccagaggaggagtatgtg

SEQ ID NO: 119244 - DNA, 22 bp, Artificial Sequence
  primer
ttccaagggaacaggaaatatg

SEQ ID NO: 119245 - DNA, 38 bp, Artificial Sequence
  primer
gtaaaacgacggccagtgtctgtggtttagcggacagc

SEQ ID NO: 119246 - DNA, 22 bp, Artificial Sequence
  primer
tcagggtaaattcatcccattg

SEQ ID NO: 119247 - DNA, 21 bp, Artificial Sequence
  primer
aacgcaatcaaacaacttccc

SEQ ID NO: 119248 - DNA, 21 bp, Artificial Sequence
  primer
gtctcctctgggaagtggctc

SEQ ID NO: 119249 - DNA, 38 bp, Artificial Sequence
  primer
gtaaaacgacggccagtacaaacctcggcaatttgttg

SEQ ID NO: 119250 - DNA, 38 bp, Artificial Sequence
  primer
gtaaaacgacggccagtagaaaccctggctgagggtag

SEQ ID NO: 119251 - DNA, 39 bp, Artificial Sequence
  primer
gtaaaacgacggccagtcatacacaactgctaatggccc

SEQ ID NO: 119252 - DNA, 38 bp, Artificial Sequence
  primer
gtaaaacgacggccagttacagcttgcaaggactctgg

SEQ ID NO: 119253 - DNA, 38 bp, Artificial Sequence
  primer
gtaaaacgacggccagtgatgtggagatgagcagggtc

SEQ ID NO: 119254 - DNA, 21 bp, Artificial Sequence
  primer
aaaggaatgtgtgtgtgctgc

SEQ ID NO: 119255 - DNA, 21 bp, Artificial Sequence
  primer
tacagctagtgggaaggcagc

SEQ ID NO: 119256 - DNA, 38 bp, Artificial Sequence
  primer
gtaaaacgacggccagtagctggactcgatttcctctg

SEQ ID NO: 119257 - DNA, 21 bp, Artificial Sequence
  primer
tgtgatgacatttctccaggg

SEQ ID NO: 119258 - DNA, 38 bp, Artificial Sequence
  primer
gtaaaacgacggccagtgctggagggtttaataatgcg

SEQ ID NO: 119259 - DNA, 25 bp, Artificial Sequence
  primer
ttgacttcatatccatgtgagtttc

SEQ ID NO: 119260 - DNA, 20 bp, Artificial Sequence
  primer
ctttgaacggcactgtgagg

SEQ ID NO: 119261 - DNA, 21 bp, Artificial Sequence
  primer
ctgcaaatctgccactgtttc

SEQ ID NO: 119262 - DNA, 38 bp, Artificial Sequence
  primer
gtaaaacgacggccagttgggtctaagagctaatgcgg

SEQ ID NO: 119263 - DNA, 20 bp, Artificial Sequence
  primer
ttgggagaagacacaggtgg

SEQ ID NO: 119264 - DNA, 21 bp, Artificial Sequence
  primer
ggatactcttgggaacctggc

SEQ ID NO: 119265 - DNA, 21 bp, Artificial Sequence
  primer
agcttgtgcttcttccagtcc

SEQ ID NO: 119266 - DNA, 37 bp, Artificial Sequence
  primer
gtaaaacgacggccagtgaggaagtcgtccaccacac

SEQ ID NO: 119267 - DNA, 38 bp, Artificial Sequence
  primer
gtaaaacgacggccagtccgcagcacacacttactttc

SEQ ID NO: 119268 - DNA, 38 bp, Artificial Sequence
  primer
gtaaaacgacggccagttcagcctaggcagtttcagtc

SEQ ID NO: 119269 - DNA, 26 bp, Artificial Sequence
  primer
ccactcctaatacctgagactgaaac

SEQ ID NO: 119270 - DNA, 21 bp, Artificial Sequence
  primer
tggctgtgcaaagaaagacac

SEQ ID NO: 119271 - DNA, 24 bp, Artificial Sequence
  primer
caaagactatgcttgagtttcctg

SEQ ID NO: 119272 - DNA, 40 bp, Artificial Sequence
  primer
gtaaaacgacggccagtcatgcagtacaaagtcacagcag

SEQ ID NO: 119273 - DNA, 21 bp, Artificial Sequence
  primer
agtccgctagagaggaggagg

SEQ ID NO: 119274 - DNA, 38 bp, Artificial Sequence
  primer
gtaaaacgacggccagtaggatgaggctagctggtacg

SEQ ID NO: 119275 - DNA, 20 bp, Artificial Sequence
  primer
aagagggctggcagtggtag

SEQ ID NO: 119276 - DNA, 37 bp, Artificial Sequence
  primer
gtaaaacgacggccagtagctgtccttgacgcagatg

SEQ ID NO: 119277 - DNA, 36 bp, Artificial Sequence
  primer
gtaaaacgacggccagtatgagggcaccaatgcttc

SEQ ID NO: 119278 - DNA, 38 bp, Artificial Sequence
  primer
gtaaaacgacggccagtgtctccaaacccactgtgctc

SEQ ID NO: 119279 - DNA, 22 bp, Artificial Sequence
  primer
gaaacaggagaatgccagaatc

SEQ ID NO: 119280 - DNA, 21 bp, Artificial Sequence
  primer
tcactctgaggctctgacagg

SEQ ID NO: 119281 - DNA, 38 bp, Artificial Sequence
  primer
gtaaaacgacggccagtagaggaccaggaagaaatggg

SEQ ID NO: 119282 - DNA, 21 bp, Artificial Sequence
  primer
aacagacagagccctccacac

SEQ ID NO: 119283 - DNA, 20 bp, Artificial Sequence
  primer
gggaagtcgacatacaacgg

SEQ ID NO: 119284 - DNA, 21 bp, Artificial Sequence
  primer
tcgcaggaggttatgaaatgg

SEQ ID NO: 119285 - DNA, 19 bp, Artificial Sequence
  primer
cacatgcacaggacacacg

SEQ ID NO: 119286 - DNA, 21 bp, Artificial Sequence
  primer
tctaagagccctaaggccaag

SEQ ID NO: 119287 - DNA, 38 bp, Artificial Sequence
  primer
gtaaaacgacggccagtaggatgcaagaagtagcaggg

SEQ ID NO: 119288 - DNA, 36 bp, Artificial Sequence
  primer
gtaaaacgacggccagtactcctgcggtgaaggaca

SEQ ID NO: 119289 - DNA, 21 bp, Artificial Sequence
  primer
tgctgtggaaacaggtagtcg

SEQ ID NO: 119290 - DNA, 21 bp, Artificial Sequence
  primer
ttgatgagctgggactggtag

SEQ ID NO: 119291 - DNA, 18 bp, Artificial Sequence
  primer
gtgggtggtgaggtggtc

SEQ ID NO: 119292 - DNA, 21 bp, Artificial Sequence
  primer
aacagaggagtacgtggtggc

SEQ ID NO: 119293 - DNA, 37 bp, Artificial Sequence
  primer
gtaaaacgacggccagtctcctatggccatctcctcc

SEQ ID NO: 119294 - DNA, 21 bp, Artificial Sequence
  primer
cttcaaagccagtgcagtcag

SEQ ID NO: 119295 - DNA, 38 bp, Artificial Sequence
  primer
gtaaaacgacggccagtctcctgcacagccagaataag

SEQ ID NO: 119296 - DNA, 38 bp, Artificial Sequence
  primer
gtaaaacgacggccagtccatgtaggtctctctggcac

SEQ ID NO: 119297 - DNA, 21 bp, Artificial Sequence
  primer
gcttatgcccagtgtggattc

SEQ ID NO: 119298 - DNA, 38 bp, Artificial Sequence
  primer
gtaaaacgacggccagtacctttgggagctggtgtatc

SEQ ID NO: 119299 - DNA, 38 bp, Artificial Sequence
  primer
gtaaaacgacggccagtgggtggtagtgtttgttgtgc

SEQ ID NO: 119300 - DNA, 20 bp, Artificial Sequence
  primer
catccatccatcaccaggtc

SEQ ID NO: 119301 - DNA, 35 bp, Artificial Sequence
  primer
gtaaaacgacggccagtggtcgtggaaagacacgg

SEQ ID NO: 119302 - DNA, 38 bp, Artificial Sequence
  primer
gtaaaacgacggccagtgggtggatctgcttgtctttg

SEQ ID NO: 119303 - DNA, 20 bp, Artificial Sequence
  primer
ttgcttgaggtggatcttgg

SEQ ID NO: 119304 - DNA, 35 bp, Artificial Sequence
  primer
gtaaaacgacggccagttttcccgctgctttcagg

SEQ ID NO: 119305 - DNA, 38 bp, Artificial Sequence
  primer
gtaaaacgacggccagtccctcctggttctcaggtatg

SEQ ID NO: 119306 - DNA, 21 bp, Artificial Sequence
  primer
agagctgaggctcatacaggc

SEQ ID NO: 119307 - DNA, 38 bp, Artificial Sequence
  primer
gtaaaacgacggccagtggatagagtctgttggctggg

SEQ ID NO: 119308 - DNA, 38 bp, Artificial Sequence
  primer
gtaaaacgacggccagtccagaggtttagggaagtccg

SEQ ID NO: 119309 - DNA, 19 bp, Artificial Sequence
  primer
tccgcacacaactctccac

SEQ ID NO: 119310 - DNA, 38 bp, Artificial Sequence
  primer
gtaaaacgacggccagtcttgctgtgccgtttcttctc

SEQ ID NO: 119311 - DNA, 37 bp, Artificial Sequence
  primer
gtaaaacgacggccagtgtgcgaggaggagttggaag

SEQ ID NO: 119312 - DNA, 21 bp, Artificial Sequence
  primer
ttgttagagttatctgcgccc

SEQ ID NO: 119313 - DNA, 21 bp, Artificial Sequence
  primer
aaactcaggtatctggctccc

SEQ ID NO: 119314 - DNA, 22 bp, Artificial Sequence
  primer
ggtaccagactggacacaaatg

SEQ ID NO: 119315 - DNA, 24 bp, Artificial Sequence
  primer
cacacgcatacatacaaacataca

SEQ ID NO: 119316 - DNA, 38 bp, Artificial Sequence
  primer
gtaaaacgacggccagtgcctctgaaacaaagaatggc

SEQ ID NO: 119317 - DNA, 22 bp, Artificial Sequence
  primer
cctgggaaatgagaatgagttt

SEQ ID NO: 119318 - DNA, 21 bp, Artificial Sequence
  primer
tatcttgttgcctgttggtgc

SEQ ID NO: 119319 - DNA, 21 bp, Artificial Sequence
  primer
tgctgatcaactccaagtggt

SEQ ID NO: 119320 - DNA, 45 bp, Artificial Sequence
  primer
gtaaaacgacggccagtaaacactcagatagtggacgagttagat

SEQ ID NO: 119321 - DNA, 40 bp, Artificial Sequence
  primer
gtaaaacgacggccagtcaaacataaatgcagtgttgcag

SEQ ID NO: 119322 - DNA, 45 bp, Artificial Sequence
  primer
gtaaaacgacggccagtaattatttcaggatgtgctaagaaatta

SEQ ID NO: 119323 - DNA, 21 bp, Artificial Sequence
  primer
aaccgcagtaagcagacaacc

SEQ ID NO: 119324 - DNA, 38 bp, Artificial Sequence
  primer
gtaaaacgacggccagtgaggctgtgcttggactaagg

SEQ ID NO: 119325 - DNA, 21 bp, Artificial Sequence
  primer
aacctgtgcttgggttgaatc

SEQ ID NO: 119326 - DNA, 38 bp, Artificial Sequence
  primer
gtaaaacgacggccagtatcagactccgtctgcctcag

SEQ ID NO: 119327 - DNA, 21 bp, Artificial Sequence
  primer
ccaaagcaatcctctttcctc

SEQ ID NO: 119328 - DNA, 39 bp, Artificial Sequence
  primer
gtaaaacgacggccagtcaagcaaattacttccctcctc

SEQ ID NO: 119329 - DNA, 38 bp, Artificial Sequence
  primer
gtaaaacgacggccagttgatgtggaaagcagcaacag

SEQ ID NO: 119330 - DNA, 24 bp, Artificial Sequence
  primer
aatggtttatgaggccataagatg

SEQ ID NO: 119331 - DNA, 38 bp, Artificial Sequence
  primer
gtaaaacgacggccagttggaattacaaactcctggca

SEQ ID NO: 119332 - DNA, 30 bp, Artificial Sequence
  primer
ttattgtaaagcttgatatttgtgtattga

SEQ ID NO: 119333 - DNA, 39 bp, Artificial Sequence
  primer
gtaaaacgacggccagtgaatgcactggagattgacatc

SEQ ID NO: 119334 - DNA, 38 bp, Artificial Sequence
  primer
gtaaaacgacggccagttttgctgaacattcaggcttc

SEQ ID NO: 119335 - DNA, 42 bp, Artificial Sequence
  primer
gtaaaacgacggccagtaaatattaaatcccaaagaaggcaa

SEQ ID NO: 119336 - DNA, 21 bp, Artificial Sequence
  primer
tccggaaggtccctagtacac

SEQ ID NO: 119337 - DNA, 38 bp, Artificial Sequence
  primer
gtaaaacgacggccagtacctctggattgaactttccg

SEQ ID NO: 119338 - DNA, 23 bp, Artificial Sequence
  primer
aaagggtggtggtggtaaagtag

SEQ ID NO: 119339 - DNA, 19 bp, Artificial Sequence
  primer
ccacgaggagcaccatagg

SEQ ID NO: 119340 - DNA, 38 bp, Artificial Sequence
  primer
gtaaaacgacggccagtggagtggtcactgagggtctc

SEQ ID NO: 119341 - DNA, 21 bp, Artificial Sequence
  primer
agaaatctcaagggcagcatc

SEQ ID NO: 119342 - DNA, 21 bp, Artificial Sequence
  primer
ctcaaagagcttgcggttgtc

SEQ ID NO: 119343 - DNA, 37 bp, Artificial Sequence
  primer
gtaaaacgacggccagtgaagtgagctgggaagggtc

SEQ ID NO: 119344 - DNA, 38 bp, Artificial Sequence
  primer
gtaaaacgacggccagtagatgggattccctccaaatc

SEQ ID NO: 119345 - DNA, 21 bp, Artificial Sequence
  primer
atcttccctagcacggtgttg

SEQ ID NO: 119346 - DNA, 38 bp, Artificial Sequence
  primer
gtaaaacgacggccagtttgagaaatggtgaggcttcc

SEQ ID NO: 119347 - DNA, 21 bp, Artificial Sequence
  primer
cctgttgaggaaggtgtttcc

SEQ ID NO: 119348 - DNA, 37 bp, Artificial Sequence
  primer
gtaaaacgacggccagttggtgggtgtctgtaatccc

SEQ ID NO: 119349 - DNA, 20 bp, Artificial Sequence
  primer
cagtccctcctccctcagac

SEQ ID NO: 119350 - DNA, 21 bp, Artificial Sequence
  primer
gggactcacagcactggtagg

SEQ ID NO: 119351 - DNA, 21 bp, Artificial Sequence
  primer
actatttgagggaggcgcttt

SEQ ID NO: 119352 - DNA, 20 bp, Artificial Sequence
  primer
cgaactcctcatcatccagc

SEQ ID NO: 119353 - DNA, 21 bp, Artificial Sequence
  primer
taagtgaacgtgaggctggag

SEQ ID NO: 119354 - DNA, 20 bp, Artificial Sequence
  primer
atggagcaccaggagtgacc

SEQ ID NO: 119355 - DNA, 21 bp, Artificial Sequence
  primer
ccaagaccctgcctactgttc

SEQ ID NO: 119356 - DNA, 38 bp, Artificial Sequence
  primer
gtaaaacgacggccagtatctcctgagctacggtggac

SEQ ID NO: 119357 - DNA, 21 bp, Artificial Sequence
  primer
ttgatgaggtcgttgagcttg

SEQ ID NO: 119358 - DNA, 36 bp, Artificial Sequence
  primer
gtaaaacgacggccagtatgatgcactggctgttgg

SEQ ID NO: 119359 - DNA, 38 bp, Artificial Sequence
  primer
gtaaaacgacggccagtatggcccagctaggagtgtag

SEQ ID NO: 119360 - DNA, 37 bp, Artificial Sequence
  primer
gtaaaacgacggccagtagtgcaaactcgtcgtcgtc

SEQ ID NO: 119361 - DNA, 38 bp, Artificial Sequence
  primer
gtaaaacgacggccagtctaatcccgagaacttggagg

SEQ ID NO: 119362 - DNA, 18 bp, Artificial Sequence
  primer
gaaggagggctcggagtg

SEQ ID NO: 119363 - DNA, 20 bp, Artificial Sequence
  primer
tgccctctcaagttacccag

SEQ ID NO: 119364 - DNA, 21 bp, Artificial Sequence
  primer
cagaaatcctctgctcacagc

SEQ ID NO: 119365 - DNA, 20 bp, Artificial Sequence
  primer
atctcctggcttaccttggc

SEQ ID NO: 119366 - DNA, 38 bp, Artificial Sequence
  primer
gtaaaacgacggccagtcgcatgttcattccttaagcc

SEQ ID NO: 119367 - DNA, 38 bp, Artificial Sequence
  primer
gtaaaacgacggccagtaagatgcgttgtccttgatcc

SEQ ID NO: 119368 - DNA, 38 bp, Artificial Sequence
  primer
gtaaaacgacggccagtttgatgggcgacagagtgtag

SEQ ID NO: 119369 - DNA, 37 bp, Artificial Sequence
  primer
gtaaaacgacggccagtattcggtgagtcagtggtgg

SEQ ID NO: 119370 - DNA, 20 bp, Artificial Sequence
  primer
ttgtcccacatcttctgctg

SEQ ID NO: 119371 - DNA, 21 bp, Artificial Sequence
  primer
tttctctgtcttgggacatgg

SEQ ID NO: 119372 - DNA, 21 bp, Artificial Sequence
  primer
tgatgccacaaccaggagtag

SEQ ID NO: 119373 - DNA, 38 bp, Artificial Sequence
  primer
gtaaaacgacggccagttaccaacaggaaggtgactgg

SEQ ID NO: 119374 - DNA, 40 bp, Artificial Sequence
  primer
gtaaaacgacggccagtcaaacctcgtctaatggtaaccc

SEQ ID NO: 119375 - DNA, 21 bp, Artificial Sequence
  primer
caccctgtttgggatgaagac

SEQ ID NO: 119376 - DNA, 38 bp, Artificial Sequence
  primer
gtaaaacgacggccagtgatccgatgaaggttgctagg

SEQ ID NO: 119377 - DNA, 21 bp, Artificial Sequence
  primer
ccgtagtgtttcttcttcccg

SEQ ID NO: 119378 - DNA, 38 bp, Artificial Sequence
  primer
gtaaaacgacggccagtgttcctggcatgtaccagttg

SEQ ID NO: 119379 - DNA, 38 bp, Artificial Sequence
  primer
gtaaaacgacggccagtcaacaagcacagctaatgcag

SEQ ID NO: 119380 - DNA, 43 bp, Artificial Sequence
  primer
gtaaaacgacggccagttcaccgctgatacttatgactacatt

SEQ ID NO: 119381 - DNA, 21 bp, Artificial Sequence
  primer
ggccaagaagttcaagaatcc

SEQ ID NO: 119382 - DNA, 35 bp, Artificial Sequence; identical to SEQ ID NO: 5167
  primer

SEQ ID NO: 119383 - DNA, 37 bp, Artificial Sequence
  primer
gtaaaacgacggccagtcggtagccctaagcaaatgg

SEQ ID NO: 119384 - DNA, 21 bp, Artificial Sequence
  primer
gcaaagacctgcttcttcagg

SEQ ID NO: 119385 - DNA, 20 bp, Artificial Sequence
  primer
ggtgccaatgaccaagtgag

SEQ ID NO: 119386 - DNA, 21 bp, Artificial Sequence
  primer
acagagcacatcaggaattgg

SEQ ID NO: 119387 - DNA, 38 bp, Artificial Sequence
  primer
gtaaaacgacggccagtggaatatcagggttctgcctg

SEQ ID NO: 119388 - DNA, 21 bp, Artificial Sequence
  primer
agcatgtgaggcataatctgg

SEQ ID NO: 119389 - DNA, 40 bp, Artificial Sequence
  primer
gtaaaacgacggccagtggaagcacattcctaaagatttg

SEQ ID NO: 119390 - DNA, 21 bp, Artificial Sequence
  primer
aagaggccagagtgctggtag

SEQ ID NO: 119391 - DNA, 38 bp, Artificial Sequence
  primer
gtaaaacgacggccagtctcctcaatgcaccaaagtcc

SEQ ID NO: 119392 - DNA, 38 bp, Artificial Sequence
  primer
gtaaaacgacggccagtgagcagcacaggcacttacag

SEQ ID NO: 119393 - DNA, 38 bp, Artificial Sequence
  primer
gtaaaacgacggccagtactgataacgaggccctgaac

SEQ ID NO: 119394 - DNA, 23 bp, Artificial Sequence
  primer
tcagggtctagaagtgaccagac

SEQ ID NO: 119395 - DNA, 38 bp, Artificial Sequence
  primer
gtaaaacgacggccagttctttctcatgaggctttgcc

SEQ ID NO: 119396 - DNA, 22 bp, Artificial Sequence
  primer
tctaatgaaatcctacgcaccc

SEQ ID NO: 119397 - DNA, 38 bp, Artificial Sequence
  primer
gtaaaacgacggccagtggaagtgatgcagttaacccg

SEQ ID NO: 119398 - DNA, 38 bp, Artificial Sequence
  primer
gtaaaacgacggccagtgtcacgcagcacaactcactc

SEQ ID NO: 119399 - DNA, 37 bp, Artificial Sequence
  primer
gtaaaacgacggccagtgacacaggacaggaaccagc

SEQ ID NO: 119400 - DNA, 38 bp, Artificial Sequence
  primer
gtaaaacgacggccagtgcaggaagcaataacgttgag

SEQ ID NO: 119401 - DNA, 21 bp, Artificial Sequence
  primer
ttcaaaggtgtcagaggttgc

SEQ ID NO: 119402 - DNA, 21 bp, Artificial Sequence
  primer
cgattcacagcactacggaac

SEQ ID NO: 119403 - DNA, 21 bp, Artificial Sequence
  primer
gatgtcccttgctcagctttc

SEQ ID NO: 119404 - DNA, 20 bp, Artificial Sequence
  primer
atctgcatccagcacaggac

SEQ ID NO: 119405 - DNA, 21 bp, Artificial Sequence
  primer
gaacacaagactgtcaagcgg

SEQ ID NO: 119406 - DNA, 37 bp, Artificial Sequence
  primer
gtaaaacgacggccagtgcttcaggagcagctttcac

SEQ ID NO: 119407 - DNA, 21 bp, Artificial Sequence
  primer
tctttcacgggaggcaactac

SEQ ID NO: 119408 - DNA, 37 bp, Artificial Sequence
  primer
gtaaaacgacggccagtacccagctcacctccaactc

SEQ ID NO: 119409 - DNA, 21 bp, Artificial Sequence
  primer
gctcaggtaacttgtcggctc

SEQ ID NO: 119410 - DNA, 38 bp, Artificial Sequence
  primer
gtaaaacgacggccagtagcagcaagaggactgaggac

SEQ ID NO: 119411 - DNA, 21 bp, Artificial Sequence
  primer
agcaagcccactcttgtcaac

SEQ ID NO: 119412 - DNA, 38 bp, Artificial Sequence
  primer
gtaaaacgacggccagttagcataaacccgagacaagc

SEQ ID NO: 119413 - DNA, 20 bp, Artificial Sequence
  primer
gtgcggaatctctcctcctc

SEQ ID NO: 119414 - DNA, 20 bp, Artificial Sequence
  primer
accgaagaggtcttccaagc

SEQ ID NO: 119415 - DNA, 23 bp, Artificial Sequence
  primer
aaatggcactgaaacatcaagtc

SEQ ID NO: 119416 - DNA, 21 bp, Artificial Sequence
  primer
tattcagggctgtgacgtttg

SEQ ID NO: 119417 - DNA, 23 bp, Artificial Sequence
  primer
cctggtacacaggaaatgttcag

SEQ ID NO: 119418 - DNA, 21 bp, Artificial Sequence
  primer
atgcccactaacttcacaggc

SEQ ID NO: 119419 - DNA, 21 bp, Artificial Sequence
  primer
aaatcattacctcccaccagc

SEQ ID NO: 119420 - DNA, 21 bp, Artificial Sequence
  primer
gtaagctccctcttgccaatg

SEQ ID NO: 119421 - DNA, 40 bp, Artificial Sequence
  primer
gtaaaacgacggccagtaagcctcactgacataactggtg

SEQ ID NO: 119422 - DNA, 21 bp, Artificial Sequence
  primer
cagtagccttcagtttggcag

SEQ ID NO: 119423 - DNA, 23 bp, Artificial Sequence
  primer
gacaaatgatgatgtagaatgcg

SEQ ID NO: 119424 - DNA, 22 bp, Artificial Sequence
  primer
tcagagagaagggaatacgcag

SEQ ID NO: 119425 - DNA, 37 bp, Artificial Sequence
  primer
gtaaaacgacggccagtgccttccagaaggaaagagc

SEQ ID NO: 119426 - DNA, 38 bp, Artificial Sequence
  primer
gtaaaacgacggccagttgcaactttgtaggcatgttg

SEQ ID NO: 119427 - DNA, 21 bp, Artificial Sequence
  primer
gcaactggaatcatttccctc

SEQ ID NO: 119428 - DNA, 38 bp, Artificial Sequence
  primer
gtaaaacgacggccagtaatgtgaccaaactgggcaac

SEQ ID NO: 119429 - DNA, 38 bp, Artificial Sequence
  primer
gtaaaacgacggccagtgtaatcgtgccaccacacttc

SEQ ID NO: 119430 - DNA, 27 bp, Artificial Sequence
  primer
caaatgcttctttaacattagaacctg

SEQ ID NO: 119431 - DNA, 38 bp, Artificial Sequence
  primer
gtaaaacgacggccagttttgtgggatgggcacttaac

SEQ ID NO: 119432 - DNA, 41 bp, Artificial Sequence
  primer
gtaaaacgacggccagttccatagttccttcacctaaccag

SEQ ID NO: 119433 - DNA, 40 bp, Artificial Sequence
  primer
gtaaaacgacggccagtaaacagtttgaccaggtgtcttc

SEQ ID NO: 119434 - DNA, 24 bp, Artificial Sequence
  primer
aacaaagtgggcttaacatctcac

SEQ ID NO: 119435 - DNA, 21 bp, Artificial Sequence
  primer
agaggcggagacttcacttcc

SEQ ID NO: 119436 - DNA, 45 bp, Artificial Sequence
  primer
gtaaaacgacggccagtaacgagaggtaatatctcactacatcat

SEQ ID NO: 119437 - DNA, 44 bp, Artificial Sequence
  primer
gtaaaacgacggccagttgtttatttggagagtacaagattcac

SEQ ID NO: 119438 - DNA, 18 bp, Artificial Sequence
  primer
gccgtgagccaagatcag

SEQ ID NO: 119439 - DNA, 42 bp, Artificial Sequence
  primer
gtaaaacgacggccagtttcaatagcaattaaattcaggaaa

SEQ ID NO: 119440 - DNA, 38 bp, Artificial Sequence
  primer
gtaaaacgacggccagtcctggaacatagacagccacc

SEQ ID NO: 119441 - DNA, 39 bp, Artificial Sequence
  primer
gtaaaacgacggccagtaaacacaaatgggcattgattc

SEQ ID NO: 119442 - DNA, 24 bp, Artificial Sequence
  primer
aaacgatggcgtaactcaaataac

SEQ ID NO: 119443 - DNA, 18 bp, Artificial Sequence
  primer
tgatccactcgcctcagc

SEQ ID NO: 119444 - DNA, 24 bp, Artificial Sequence
  primer
acaacaatgagaactgctgatacc

SEQ ID NO: 119445 - DNA, 29 bp, Artificial Sequence
  primer
catagtatgcctcttaggaatattgactt

SEQ ID NO: 119446 - DNA, 38 bp, Artificial Sequence
  primer
gtaaaacgacggccagtgacattaagtgtgggcacagg

SEQ ID NO: 119447 - DNA, 39 bp, Artificial Sequence
  primer
gtaaaacgacggccagtaatatttaccttacccgacggc

SEQ ID NO: 119448 - DNA, 22 bp, Artificial Sequence
  primer
tcatgttagccaaaccgatctc

SEQ ID NO: 119449 - DNA, 37 bp, Artificial Sequence
  primer
gtaaaacgacggccagtattaaggcatgagccacacc

SEQ ID NO: 119450 - DNA, 22 bp, Artificial Sequence
  primer
gaagcaaagcaagtctcagagc

SEQ ID NO: 119451 - DNA, 21 bp, Artificial Sequence
  primer
ctgggtgtagtagcacatgcc

SEQ ID NO: 119452 - DNA, 38 bp, Artificial Sequence
  primer
gtaaaacgacggccagttaaactggaaatccacaccgc

SEQ ID NO: 119453 - DNA, 23 bp, Artificial Sequence
  primer
aaccattctcagcttgtggtatg

SEQ ID NO: 119454 - DNA, 21 bp, Artificial Sequence
  primer
gaatcactgcaacacaggagg

SEQ ID NO: 119455 - DNA, 35 bp, Artificial Sequence
  primer
gtaaaacgacggccagtgcgagagaaggccacaca

SEQ ID NO: 119456 - DNA, 38 bp, Artificial Sequence
  primer
gtaaaacgacggccagtgcaactcctacatgagatggg

SEQ ID NO: 119457 - DNA, 40 bp, Artificial Sequence
  primer
gtaaaacgacggccagttttaatcaaccaacatcaagtcg

SEQ ID NO: 119458 - DNA, 21 bp, Artificial Sequence
  primer
attgcagttagcgctgtcaac

SEQ ID NO: 119459 - DNA, 21 bp, Artificial Sequence
  primer
actgcacccaaccctgtattg

SEQ ID NO: 119460 - DNA, 38 bp, Artificial Sequence
  primer
gtaaaacgacggccagtgaaccatcatctggctcttcc

SEQ ID NO: 119461 - DNA, 41 bp, Artificial Sequence
  primer
gtaaaacgacggccagtcgaagcattgtaccaactataccc

SEQ ID NO: 119462 - DNA, 18 bp, Artificial Sequence
  primer
cccacaacagtccctggt

SEQ ID NO: 119463 - DNA, 21 bp, Artificial Sequence
  primer
tgtaagggaacgtgtgaatgg

SEQ ID NO: 119464 - DNA, 36 bp, Artificial Sequence
  primer
gtaaaacgacggccagtatgggttccatggcttcag

SEQ ID NO: 119465 - DNA, 38 bp, Artificial Sequence
  primer
gtaaaacgacggccagttaaatcactggctgtcttggc

SEQ ID NO: 119466 - DNA, 40 bp, Artificial Sequence
  primer
gtaaaacgacggccagttgatgattcagaagcgctagaag

SEQ ID NO: 119467 - DNA, 23 bp, Artificial Sequence
  primer
tggtaattagccaagatctcacc

SEQ ID NO: 119468 - DNA, 41 bp, Artificial Sequence
  primer
gtaaaacgacggccagttctgaaactctgctcaaataaggg

SEQ ID NO: 119469 - DNA, 38 bp, Artificial Sequence
  primer
gtaaaacgacggccagtcatggccatttcacagacaac

SEQ ID NO: 119470 - DNA, 21 bp, Artificial Sequence
  primer
tcggagtaagccaaactcctc

SEQ ID NO: 119471 - DNA, 20 bp, Artificial Sequence
  primer
agcaagtctgcagcaagagg

SEQ ID NO: 119472 - DNA, 21 bp, Artificial Sequence
  primer
ctgtgcccagctgagaagata

SEQ ID NO: 119473 - DNA, 42 bp, Artificial Sequence
  primer
gtaaaacgacggccagtaaatctgggtgtatatttgtgtttg

SEQ ID NO: 119474 - DNA, 38 bp, Artificial Sequence
  primer
gtaaaacgacggccagtgtgagggcaagaactgtctgc

SEQ ID NO: 119475 - DNA, 39 bp, Artificial Sequence
  primer
gtaaaacgacggccagttcgatcctcaggtttctttgag

SEQ ID NO: 119476 - DNA, 24 bp, Artificial Sequence
  primer
aaagaataaagagatgagccagga

SEQ ID NO: 119477 - DNA, 18 bp, Artificial Sequence
  primer
ccctacaccgcatcctcc

SEQ ID NO: 119478 - DNA, 21 bp, Artificial Sequence
  primer
gccctaaagggacacaaactg

SEQ ID NO: 119479 - DNA, 39 bp, Artificial Sequence
  primer
gtaaaacgacggccagtcccttcctacctcacagttctc

SEQ ID NO: 119480 - DNA, 21 bp, Artificial Sequence
  primer
cgacagagcaagactccgtat

SEQ ID NO: 119481 - DNA, 39 bp, Artificial Sequence
  primer
gtaaaacgacggccagtttcgttccacccaatcaataag

SEQ ID NO: 119482 - DNA, 38 bp, Artificial Sequence
  primer
gtaaaacgacggccagtctcaagggcaacgtacatcag

SEQ ID NO: 119483 - DNA, 38 bp, Artificial Sequence
  primer
gtaaaacgacggccagttgctgcttccaagaaatgatg

SEQ ID NO: 119484 - DNA, 23 bp, Artificial Sequence
  primer
aatcattcatgaaattgtctccc

SEQ ID NO: 119485 - DNA, 37 bp, Artificial Sequence
  primer
gtaaaacgacggccagtagccagactgtgatgggttg

SEQ ID NO: 119486 - DNA, 25 bp, Artificial Sequence
  primer
atttattgagggttaagcctatgtt

SEQ ID NO: 119487 - DNA, 26 bp, Artificial Sequence
  primer
ttagaacctaagatttgaaacgtctg

SEQ ID NO: 119488 - DNA, 23 bp, Artificial Sequence
  primer
caacagaactctgctgttccttt

SEQ ID NO: 119489 - DNA, 21 bp, Artificial Sequence
  primer
ggtgggcttgaaagcagttag

SEQ ID NO: 119490 - DNA, 38 bp, Artificial Sequence
  primer
gtaaaacgacggccagtacagaccttgaggtccctgtg

SEQ ID NO: 119491 - DNA, 39 bp, Artificial Sequence
  primer
gtaaaacgacggccagtcccttcgaggctactttctcag

SEQ ID NO: 119492 - DNA, 40 bp, Artificial Sequence
  primer
gtaaaacgacggccagttccactactggaacactactgcc

SEQ ID NO: 119493 - DNA, 25 bp, Artificial Sequence
  primer
ttgaagactgagctttaaatggaag

SEQ ID NO: 119494 - DNA, 38 bp, Artificial Sequence
  primer
gtaaaacgacggccagtgacctttggcttcctcatctg

SEQ ID NO: 119495 - DNA, 21 bp, Artificial Sequence
  primer
ggctcaaattaggttatgccc

SEQ ID NO: 119496 - DNA, 21 bp, Artificial Sequence
  primer
taaagtgagcatgggtggaac

SEQ ID NO: 119497 - DNA, 38 bp, Artificial Sequence
  primer
gtaaaacgacggccagttttatgtggaatgggagcagg

SEQ ID NO: 119498 - DNA, 37 bp, Artificial Sequence
  primer
gtaaaacgacggccagtacaagtgtgagccaccatgc

SEQ ID NO: 119499 - DNA, 21 bp, Artificial Sequence
  primer
tttaagacctggactgagggc

SEQ ID NO: 119500 - DNA, 39 bp, Artificial Sequence
  primer
gtaaaacgacggccagtaatctcttccctccctcatttg

SEQ ID NO: 119501 - DNA, 21 bp, Artificial Sequence
  primer
tatcgcctgaaatttccatca

SEQ ID NO: 119502 - DNA, 38 bp, Artificial Sequence
  primer
gtaaaacgacggccagtgcttgatggtcttccttggac

SEQ ID NO: 119503 - DNA, 21 bp, Artificial Sequence
  primer
tcctccctggtcaaacagttc

SEQ ID NO: 119504 - DNA, 21 bp, Artificial Sequence
  primer
cgccaaacatctcctttcttc

SEQ ID NO: 119505 - DNA, 39 bp, Artificial Sequence
  primer
gtaaaacgacggccagtttagatgtctggcacactccag

SEQ ID NO: 119506 - DNA, 38 bp, Artificial Sequence
  primer
gtaaaacgacggccagttggcacacatcaaactaatgg

SEQ ID NO: 119507 - DNA, 21 bp, Artificial Sequence
  primer
cagccatattcacttccctcc

SEQ ID NO: 119508 - DNA, 38 bp, Artificial Sequence
  primer
gtaaaacgacggccagtcaggaaggactgggagaagac

SEQ ID NO: 119509 - DNA, 21 bp, Artificial Sequence
  primer
tggtcaacacgtctggatttc

SEQ ID NO: 119510 - DNA, 24 bp, Artificial Sequence
  primer
aaccatataaagtttcccaaaccc

SEQ ID NO: 119511 - DNA, 38 bp, Artificial Sequence
  primer
gtaaaacgacggccagttttggtagtggcaataagccc

SEQ ID NO: 119512 - DNA, 39 bp, Artificial Sequence
  primer
gtaaaacgacggccagtcccatagctttccctctatttc

SEQ ID NO: 119513 - DNA, 39 bp, Artificial Sequence
  primer
gtaaaacgacggccagttctatccgctaacacttccagg

SEQ ID NO: 119514 - DNA, 23 bp, Artificial Sequence
  primer
cctgggagccaattattctactc

SEQ ID NO: 119515 - DNA, 38 bp, Artificial Sequence
  primer
gtaaaacgacggccagtgggactaaatcccaaatgctg

SEQ ID NO: 119516 - DNA, 39 bp, Artificial Sequence
  primer
gtaaaacgacggccagttgaggtgacttcctttgctcag

SEQ ID NO: 119517 - DNA, 39 bp, Artificial Sequence
  primer
gtaaaacgacggccagtgacacaagagaatgagtggcag

SEQ ID NO: 119518 - DNA, 23 bp, Artificial Sequence
  primer
agaatctgtgagaaactggcttg

SEQ ID NO: 119519 - DNA, 22 bp, Artificial Sequence
  primer
tgatatgcccgaacactaacag

SEQ ID NO: 119520 - DNA, 38 bp, Artificial Sequence
  primer
gtaaaacgacggccagtaggaccaaacatttcctccac

SEQ ID NO: 119521 - DNA, 20 bp, Artificial Sequence
  primer
gtactgtggctgggcttctg

SEQ ID NO: 119522 - DNA, 38 bp, Artificial Sequence
  primer
gtaaaacgacggccagtctgcaggacagactgagaagc

SEQ ID NO: 119523 - DNA, 21 bp, Artificial Sequence
  primer
gctcccaattcagtttcatgg

SEQ ID NO: 119524 - DNA, 39 bp, Artificial Sequence
  primer
gtaaaacgacggccagtttctcccttctcctaatcccag

SEQ ID NO: 119525 - DNA, 38 bp, Artificial Sequence
  primer
gtaaaacgacggccagtgaaacacatttcctccctgtg

SEQ ID NO: 119526 - DNA, 39 bp, Artificial Sequence
  primer
gtaaaacgacggccagtgccctctcagtactatctttgc

SEQ ID NO: 119527 - DNA, 38 bp, Artificial Sequence
  primer
gtaaaacgacggccagttgaaatgcagggattgacatc

SEQ ID NO: 119528 - DNA, 22 bp, Artificial Sequence
  primer
aactaacacaggaggcaactcg

SEQ ID NO: 119529 - DNA, 21 bp, Artificial Sequence
  primer
atttccagtcacctacacggc

SEQ ID NO: 119530 - DNA, 19 bp, Artificial Sequence
  primer
gtgtgagccacagcacctg

SEQ ID NO: 119531 - DNA, 39 bp, Artificial Sequence
  primer
gtaaaacgacggccagttccagtgtcacaagcagttagc

SEQ ID NO: 119532 - DNA, 21 bp, Artificial Sequence
  primer
cctctctgaaggacagatggg

SEQ ID NO: 119533 - DNA, 21 bp, Artificial Sequence
  primer
ctgcatccaaattctgctgac

SEQ ID NO: 119534 - DNA, 21 bp, Artificial Sequence
  primer
ctgccagaccctgacacatag

SEQ ID NO: 119535 - DNA, 21 bp, Artificial Sequence
  primer
ggcgtcaaacctcaacaagac

SEQ ID NO: 119536 - DNA, 38 bp, Artificial Sequence
  primer
gtaaaacgacggccagtctgcacccagcctcttcttag

SEQ ID NO: 119537 - DNA, 21 bp, Artificial Sequence
  primer
gactctggaaacacaaccagc

SEQ ID NO: 119538 - DNA, 20 bp, Artificial Sequence
  primer
attagccggacaaggtggtg

SEQ ID NO: 119539 - DNA, 40 bp, Artificial Sequence
  primer
gtaaaacgacggccagtgacagggaagatccagttaatgc

SEQ ID NO: 119540 - DNA, 22 bp, Artificial Sequence
  primer
aagtctccacagcaagtgagtg

SEQ ID NO: 119541 - DNA, 39 bp, Artificial Sequence
  primer
gtaaaacgacggccagtgatcctgttggactgtaatccg

SEQ ID NO: 119542 - DNA, 21 bp, Artificial Sequence
  primer
gtgtggctttatgaacgggac

SEQ ID NO: 119543 - DNA, 38 bp, Artificial Sequence
  primer
gtaaaacgacggccagttatgacttacgggaaatgggc

SEQ ID NO: 119544 - DNA, 20 bp, Artificial Sequence
  primer
gggacttacccaccagcttc

SEQ ID NO: 119545 - DNA, 35 bp, Artificial Sequence
  primer
gtaaaacgacggccagtttggcctgactcactggg

SEQ ID NO: 119546 - DNA, 38 bp, Artificial Sequence
  primer
gtaaaacgacggccagtagaggataagaggagccaacg

SEQ ID NO: 119547 - DNA, 38 bp, Artificial Sequence
  primer
gtaaaacgacggccagtccaataaagtctccgagcagg

SEQ ID NO: 119548 - DNA, 38 bp, Artificial Sequence
  primer
gtaaaacgacggccagttcaggaaggaggacaaacctc

SEQ ID NO: 119549 - DNA, 37 bp, Artificial Sequence
  primer
gtaaaacgacggccagtaatggccctacccatctctc

SEQ ID NO: 119550 - DNA, 21 bp, Artificial Sequence
  primer
ccaagagaggaacaatgatgc

SEQ ID NO: 119551 - DNA, 21 bp, Artificial Sequence
  primer
gtcccagagttcaagcctacc

SEQ ID NO: 119552 - DNA, 23 bp, Artificial Sequence
  primer
aaacacaacttgacagcattcag

SEQ ID NO: 119553 - DNA, 38 bp, Artificial Sequence
  primer
gtaaaacgacggccagtgcttcagcagcaacactcaag

SEQ ID NO: 119554 - DNA, 38 bp, Artificial Sequence
  primer
gtaaaacgacggccagtgccaacgagttctagtcaccc

SEQ ID NO: 119555 - DNA, 18 bp, Artificial Sequence
  primer
cggcctaggtgacagagc

SEQ ID NO: 119556 - DNA, 21 bp, Artificial Sequence
  primer
ttcagggaaagcatgagtgag

SEQ ID NO: 119557 - DNA, 38 bp, Artificial Sequence
  primer
gtaaaacgacggccagtagccttcatcctgtctcatgg

SEQ ID NO: 119558 - DNA, 36 bp, Artificial Sequence
  primer
gtaaaacgacggccagtgaggcatcatgggttaccg

SEQ ID NO: 119559 - DNA, 20 bp, Artificial Sequence
  primer
gccttgagtcaggcatcttg

SEQ ID NO: 119560 - DNA, 38 bp, Artificial Sequence
  primer
gtaaaacgacggccagtctcaaccttgggaatgacagg

SEQ ID NO: 119561 - DNA, 38 bp, Artificial Sequence
  primer
gtaaaacgacggccagtggctgatgaggttcaggactt

SEQ ID NO: 119562 - DNA, 38 bp, Artificial Sequence
  primer
gtaaaacgacggccagtcttgattagcactttgcctgg

SEQ ID NO: 119563 - DNA, 21 bp, Artificial Sequence
  primer
cgcagtgtacgtatgtgcttg

SEQ ID NO: 119564 - DNA, 38 bp, Artificial Sequence
  primer
gtaaaacgacggccagtctgacatggagctttggactg

SEQ ID NO: 119565 - DNA, 37 bp, Artificial Sequence
  primer
gtaaaacgacggccagttgggtcccaagaatgagagg

SEQ ID NO: 119566 - DNA, 38 bp, Artificial Sequence
  primer
gtaaaacgacggccagtactgcgctcgagactgtgtag

SEQ ID NO: 119567 - DNA, 38 bp, Artificial Sequence
  primer
gtaaaacgacggccagtgaaataaaccgacacgggatg

SEQ ID NO: 119568 - DNA, 21 bp, Artificial Sequence
  primer
ctcccttatctctcccaccac

SEQ ID NO: 119569 - DNA, 37 bp, Artificial Sequence; identical to SEQ ID NO: 119565
  primer

SEQ ID NO: 119570 - DNA, 20 bp, Artificial Sequence
  primer
cttctcactttgcacccagc

SEQ ID NO: 119571 - DNA, 22 bp, Artificial Sequence
  primer
cagttctgccttgggttcatac

SEQ ID NO: 119572 - DNA, 21 bp, Artificial Sequence
  primer
ccagagatgaccttgggtgac

SEQ ID NO: 119573 - DNA, 20 bp, Artificial Sequence
  primer
aggaacttgatggcgttgtg

SEQ ID NO: 119574 - DNA, 38 bp, Artificial Sequence
  primer
gtaaaacgacggccagtatggccaaaccattccttaac

SEQ ID NO: 119575 - DNA, 21 bp, Artificial Sequence
  primer
cttattcccaaaggcaagtgg

SEQ ID NO: 119576 - DNA, 21 bp, Artificial Sequence
  primer
ggtcaagactgcagtgagctg

SEQ ID NO: 119577 - DNA, 39 bp, Artificial Sequence
  primer
gtaaaacgacggccagtggaaggcgtacccattatgttc

SEQ ID NO: 119578 - DNA, 21 bp, Artificial Sequence
  primer
agtcccaatgtactggcatgg

SEQ ID NO: 119579 - DNA, 38 bp, Artificial Sequence; identical to SEQ ID NO: 119567
  primer

SEQ ID NO: 119580 - DNA, 38 bp, Artificial Sequence
  primer
gtaaaacgacggccagttaacagcatagacgcaggtcc

SEQ ID NO: 119581 - DNA, 42 bp, Artificial Sequence
  primer
gtaaaacgacggccagtcagatacaaagtttcagctgctcac

SEQ ID NO: 119582 - DNA, 20 bp, Artificial Sequence
  primer
gacaggagggacagaactgc

SEQ ID NO: 119583 - DNA, 38 bp, Artificial Sequence
  primer
gtaaaacgacggccagtctactgccctgaaacaggctc

SEQ ID NO: 119584 - DNA, 39 bp, Artificial Sequence
  primer
gtaaaacgacggccagtgggagaagaaatataccctggc

SEQ ID NO: 119585 - DNA, 37 bp, Artificial Sequence
  primer
gtaaaacgacggccagttttcctccctcctaagcctc

SEQ ID NO: 119586 - DNA, 20 bp, Artificial Sequence
  primer
cccttgtgtttctggagacg

SEQ ID NO: 119587 - DNA, 20 bp, Artificial Sequence
  primer
ggtgcaaagagatcaccgag

SEQ ID NO: 119588 - DNA, 38 bp, Artificial Sequence
  primer
gtaaaacgacggccagtagcagctcctacttctgctgg

SEQ ID NO: 119589 - DNA, 38 bp, Artificial Sequence
  primer
gtaaaacgacggccagtgccctgtctgcctgaataaag

SEQ ID NO: 119590 - DNA, 38 bp, Artificial Sequence
  primer
gtaaaacgacggccagtagcaaggataagttcatgggc

SEQ ID NO: 119591 - DNA, 21 bp, Artificial Sequence
  primer
gtctttccatttgggatgtcg

SEQ ID NO: 119592 - DNA, 21 bp, Artificial Sequence
  primer
ctctagagcccaaccagcttc

SEQ ID NO: 119593 - DNA, 38 bp, Artificial Sequence
  primer
gtaaaacgacggccagtaagcatattgggagtggatgg

SEQ ID NO: 119594 - DNA, 21 bp, Artificial Sequence
  primer
gggaggtgcacataactctcc

SEQ ID NO: 119595 - DNA, 38 bp, Artificial Sequence
  primer
gtaaaacgacggccagttgtagttccagcctctgctcc

SEQ ID NO: 119596 - DNA, 21 bp, Artificial Sequence
  primer
cttccatcacttggaaaccac

SEQ ID NO: 119597 - DNA, 37 bp, Artificial Sequence
  primer
gtaaaacgacggccagtttcagcatttacccgacgtg

SEQ ID NO: 119598 - DNA, 38 bp, Artificial Sequence
  primer
gtaaaacgacggccagtaaacatcagcacctacccacc

SEQ ID NO: 119599 - DNA, 20 bp, Artificial Sequence
  primer
ctggcaagtggtagggcttc

SEQ ID NO: 119600 - DNA, 38 bp, Artificial Sequence
  primer
gtaaaacgacggccagttgccagggctgtaggaattag

SEQ ID NO: 119601 - DNA, 21 bp, Artificial Sequence
  primer
ctgtccacagtgggtgacttc

SEQ ID NO: 119602 - DNA, 37 bp, Artificial Sequence
  primer
gtaaaacgacggccagtgctcattctcaaggccagtg

SEQ ID NO: 119603 - DNA, 21 bp, Artificial Sequence
  primer
attcagcttgtctctgcctgg

SEQ ID NO: 119604 - DNA, 20 bp, Artificial Sequence
  primer
tgggttctcctgaaggaagg

SEQ ID NO: 119605 - DNA, 39 bp, Artificial Sequence
  primer
gtaaaacgacggccagtgagcctcagtagagtcaggtgg

SEQ ID NO: 119606 - DNA, 21 bp, Artificial Sequence
  primer
atgcaggcagagtcaagacag

SEQ ID NO: 119607 - DNA, 38 bp, Artificial Sequence
  primer
gtaaaacgacggccagttccagactgagtccttcccag

SEQ ID NO: 119608 - DNA, 38 bp, Artificial Sequence
  primer
gtaaaacgacggccagtcaccatccagtacccactctg

SEQ ID NO: 119609 - DNA, 21 bp, Artificial Sequence
  primer
tatcaagggaatgggaattgg

SEQ ID NO: 119610 - DNA, 38 bp, Artificial Sequence
  primer
gtaaaacgacggccagtacacctctcagtgccaatagc

SEQ ID NO: 119611 - DNA, 38 bp, Artificial Sequence
  primer
gtaaaacgacggccagtgtataagggaaggacgggagg

SEQ ID NO: 119612 - DNA, 21 bp, Artificial Sequence
  primer
tagctgaaattgtgccactgc

SEQ ID NO: 119613 - DNA, 19 bp, Artificial Sequence
  primer
agacgagcccaatgacacc

SEQ ID NO: 119614 - DNA, 38 bp, Artificial Sequence
  primer
gtaaaacgacggccagttccttgcttcctctggatttg

SEQ ID NO: 119615 - DNA, 38 bp, Artificial Sequence
  primer
gtaaaacgacggccagtaacccagatggatctgctgag

SEQ ID NO: 119616 - DNA, 38 bp, Artificial Sequence
  primer
gtaaaacgacggccagtgtggcagtgaactgctctctc

SEQ ID NO: 119617 - DNA, 21 bp, Artificial Sequence
  primer
cgttcctcggacagatttcag

SEQ ID NO: 119618 - DNA, 21 bp, Artificial Sequence
  primer
caacactgcaggtgagaccag

SEQ ID NO: 119619 - DNA, 21 bp, Artificial Sequence
  primer
ctgatggctacattctgccac

SEQ ID NO: 119620 - DNA, 38 bp, Artificial Sequence
  primer
gtaaaacgacggccagtgaatcatggctccagagtgtg

SEQ ID NO: 119621 - DNA, 21 bp, Artificial Sequence
  primer
tgccatttgtatctgactggg

SEQ ID NO: 119622 - DNA, 38 bp, Artificial Sequence
  primer
gtaaaacgacggccagtatctctctagcagctgcgtcc

SEQ ID NO: 119623 - DNA, 21 bp, Artificial Sequence
  primer
tctcctgcatggaacacagtc

SEQ ID NO: 119624 - DNA, 21 bp, Artificial Sequence
  primer
gaaaggctgatgaaccctgac

SEQ ID NO: 119625 - DNA, 37 bp, Artificial Sequence
  primer
gtaaaacgacggccagtgggcttaggcaggaacaaac

SEQ ID NO: 119626 - DNA, 38 bp, Artificial Sequence
  primer
gtaaaacgacggccagtgacatctttgctctgctgtgg

SEQ ID NO: 119627 - DNA, 21 bp, Artificial Sequence
  primer
ctccagacacctctctcccac

SEQ ID NO: 119628 - DNA, 21 bp, Artificial Sequence
  primer
tgagagccacatcattcttgc

SEQ ID NO: 119629 - DNA, 21 bp, Artificial Sequence
  primer
cagagtcaccctagagcctgg

SEQ ID NO: 119630 - DNA, 21 bp, Artificial Sequence
  primer
tgcaagtgtttgctgaatgtg

SEQ ID NO: 119631 - DNA, 21 bp, Artificial Sequence
  primer
gtgccattaacaggccttctg

SEQ ID NO: 119632 - DNA, 37 bp, Artificial Sequence
  primer
gtaaaacgacggccagtgtctcatgttcgatgctggc

SEQ ID NO: 119633 - DNA, 36 bp, Artificial Sequence
  primer
gtaaaacgacggccagtgaggagcagggatgctcag

SEQ ID NO: 119634 - DNA, 37 bp, Artificial Sequence
  primer
gtaaaacgacggccagtcagcctgatttcaggagcat

SEQ ID NO: 119635 - DNA, 24 bp, Artificial Sequence
  primer
aaatgttcagaacctcagtgaagc

SEQ ID NO: 119636 - DNA, 38 bp, Artificial Sequence
  primer
gtaaaacgacggccagtggtttaaccaagggaagcctg

SEQ ID NO: 119637 - DNA, 21 bp, Artificial Sequence
  primer
gcagcattccaaggtaaattc

SEQ ID NO: 119638 - DNA, 39 bp, Artificial Sequence
  primer
gtaaaacgacggccagtggcatttctttcaaataccacc

SEQ ID NO: 119639 - DNA, 38 bp, Artificial Sequence
  primer
gtaaaacgacggccagtacacatgaacaattcttgccc

SEQ ID NO: 119640 - DNA, 40 bp, Artificial Sequence
  primer
gtaaaacgacggccagtggattatggatgaacttgtttcg

SEQ ID NO: 119641 - DNA, 39 bp, Artificial Sequence
  primer
gtaaaacgacggccagttgggttgataaggacatggttc

SEQ ID NO: 119642 - DNA, 38 bp, Artificial Sequence
  primer
gtaaaacgacggccagtatgtcccatactccatggctc

SEQ ID NO: 119643 - DNA, 18 bp, Artificial Sequence
  primer
gtgagctgggatcacgcc

SEQ ID NO: 119644 - DNA, 18 bp, Artificial Sequence
  primer
ccagcccggaaactcttt

SEQ ID NO: 119645 - DNA, 41 bp, Artificial Sequence
  primer
gtaaaacgacggccagtgggtctcttacacagcccttatag

SEQ ID NO: 119646 - DNA, 38 bp, Artificial Sequence
  primer
gtaaaacgacggccagtggaacttccaaactccaaacc

SEQ ID NO: 119647 - DNA, 21 bp, Artificial Sequence
  primer
caagcaaggcatacacattcg

SEQ ID NO: 119648 - DNA, 38 bp, Artificial Sequence
  primer
gtaaaacgacggccagtgaaatcctgctgttggcagag

SEQ ID NO: 119649 - DNA, 38 bp, Artificial Sequence
  primer
gtaaaacgacggccagtcctctcaaggtaaggaaaggg

SEQ ID NO: 119650 - DNA, 38 bp, Artificial Sequence
  primer
gtaaaacgacggccagtgaaaccttgggcagtcagttc

SEQ ID NO: 119651 - DNA, 21 bp, Artificial Sequence
  primer
tgttggtttctgtatggctgg

SEQ ID NO: 119652 - DNA, 39 bp, Artificial Sequence; identical to SEQ ID NO: 119638
  primer

SEQ ID NO: 119653 - DNA, 19 bp, Artificial Sequence
  primer
gtcaccttcccgaacctcc

SEQ ID NO: 119654 - DNA, 38 bp, Artificial Sequence
  primer
gtaaaacgacggccagtatccagcactttgctagagcc

SEQ ID NO: 119655 - DNA, 21 bp, Artificial Sequence
  primer
tttgtgtgtgttgggaagaaa

SEQ ID NO: 119656 - DNA, 38 bp, Artificial Sequence
  primer
gtaaaacgacggccagtttcaatggctccagtacaacc

SEQ ID NO: 119657 - DNA, 20 bp, Artificial Sequence
  primer
ccggtagaaagcagttgcag

SEQ ID NO: 119658 - DNA, 38 bp, Artificial Sequence
  primer
gtaaaacgacggccagtaagcccaggtctgtgtgactc

SEQ ID NO: 119659 - DNA, 36 bp, Artificial Sequence
  primer
gtaaaacgacggccagtccggccaataaccaatttc

SEQ ID NO: 119660 - DNA, 39 bp, Artificial Sequence
  primer
gtaaaacgacggccagtcatcttaaacctttgccaaacc

SEQ ID NO: 119661 - DNA, 39 bp, Artificial Sequence
  primer
gtaaaacgacggccagtagtaactgtgtcccaggaggag

SEQ ID NO: 119662 - DNA, 37 bp, Artificial Sequence
  primer
gtaaaacgacggccagttgggtaaattcagcagtggc

SEQ ID NO: 119663 - DNA, 38 bp, Artificial Sequence
  primer
gtaaaacgacggccagttgggagtcagggatttagtgc

SEQ ID NO: 119664 - DNA, 40 bp, Artificial Sequence
  primer
gtaaaacgacggccagtgagagtttgaggtttgtgactgc

SEQ ID NO: 119665 - DNA, 21 bp, Artificial Sequence
  primer
tctgggaattgggtatatggg

SEQ ID NO: 119666 - DNA, 39 bp, Artificial Sequence
  primer
gtaaaacgacggccagtacccagaatggtagatgagagg

SEQ ID NO: 119667 - DNA, 21 bp, Artificial Sequence
  primer
tggtcatctaaacccaactgc

SEQ ID NO: 119668 - DNA, 40 bp, Artificial Sequence
  primer
gtaaaacgacggccagtaagcattaacaaagttaggcacg

SEQ ID NO: 119669 - DNA, 39 bp, Artificial Sequence
  primer
gtaaaacgacggccagtcattacaagctctcagaggcac

SEQ ID NO: 119670 - DNA, 38 bp, Artificial Sequence
  primer
gtaaaacgacggccagttctagaggcggtaggcatttg

SEQ ID NO: 119671 - DNA, 26 bp, Artificial Sequence
  primer
gcttagatagctaattggcatccttt

SEQ ID NO: 119672 - DNA, 38 bp, Artificial Sequence
  primer
gtaaaacgacggccagtagcagttgaagtcacccacag

SEQ ID NO: 119673 - DNA, 42 bp, Artificial Sequence
  primer
gtaaaacgacggccagtcatggatgctatgctgttaaatatc

SEQ ID NO: 119674 - DNA, 25 bp, Artificial Sequence
  primer
ttagctgaactcacaagactgtttc

SEQ ID NO: 119675 - DNA, 21 bp, Artificial Sequence
  primer
tcgctggctttctaccaatag

SEQ ID NO: 119676 - DNA, 21 bp, Artificial Sequence
  primer
atatgacattccaaggccgac

SEQ ID NO: 119677 - DNA, 38 bp, Artificial Sequence
  primer
gtaaaacgacggccagtaggagggcatttcatgttctg

SEQ ID NO: 119678 - DNA, 21 bp, Artificial Sequence
  primer
ctcaacgtgtgctctccattc

SEQ ID NO: 119679 - DNA, 20 bp, Artificial Sequence
  primer
cttgtcaggctgagaggtcg

SEQ ID NO: 119680 - DNA, 22 bp, Artificial Sequence
  primer
gacgctaccagtggcaattaag

SEQ ID NO: 119681 - DNA, 38 bp, Artificial Sequence
  primer
gtaaaacgacggccagttgccattatcaagccaaacac

SEQ ID NO: 119682 - DNA, 38 bp, Artificial Sequence
  primer
gtaaaacgacggccagtgctgtgtgacctctctgcatc

SEQ ID NO: 119683 - DNA, 21 bp, Artificial Sequence
  primer
tgaacggtgaactccctcaac

SEQ ID NO: 119684 - DNA, 38 bp, Artificial Sequence
  primer
gtaaaacgacggccagttgatttcactcctccactggc

SEQ ID NO: 119685 - DNA, 38 bp, Artificial Sequence
  primer
gtaaaacgacggccagtgcaatcaaatggctcttcctc

SEQ ID NO: 119686 - DNA, 38 bp, Artificial Sequence
  primer
gtaaaacgacggccagtttgcaaggacttcagaccaac

SEQ ID NO: 119687 - DNA, 38 bp, Artificial Sequence
  primer
gtaaaacgacggccagttgactagtcccaataccaccg

SEQ ID NO: 119688 - DNA, 20 bp, Artificial Sequence
  primer
caccgcaaatgtagcagatg

SEQ ID NO: 119689 - DNA, 21 bp, Artificial Sequence
  primer
caggtgtactgctcccacaag

SEQ ID NO: 119690 - DNA, 38 bp, Artificial Sequence
  primer
gtaaaacgacggccagtggttcaccgtttaacacctcg

SEQ ID NO: 119691 - DNA, 38 bp, Artificial Sequence
  primer
gtaaaacgacggccagttcccattcatgtcacccttag

SEQ ID NO: 119692 - DNA, 25 bp, Artificial Sequence
  primer
aaacaacctcagttctaacttgctg

SEQ ID NO: 119693 - DNA, 22 bp, Artificial Sequence
  primer
agcactgccaatacaatctcag

SEQ ID NO: 119694 - DNA, 21 bp, Artificial Sequence
  primer
tgggaggagtgaagtttgaag

SEQ ID NO: 119695 - DNA, 22 bp, Artificial Sequence
  primer
gcttaaccacatgattgttccc

SEQ ID NO: 119696 - DNA, 18 bp, Artificial Sequence
  primer
caggaggtggaggttgcc

SEQ ID NO: 119697 - DNA, 38 bp, Artificial Sequence
  primer
gtaaaacgacggccagttcctcaaggaagattgtgtgc

SEQ ID NO: 119698 - DNA, 44 bp, Artificial Sequence
  primer
gtaaaacgacggccagtcctactaaggtaacgaactgtgaaatc

SEQ ID NO: 119699 - DNA, 37 bp, Artificial Sequence
  primer
gtaaaacgacggccagtaccttgacgtcctcgtcctc

SEQ ID NO: 119700 - DNA, 20 bp, Artificial Sequence
  primer
ggagagcagactctcaaccg

SEQ ID NO: 119701 - DNA, 38 bp, Artificial Sequence
  primer
gtaaaacgacggccagtttgtgagcgttctgtcatttg

SEQ ID NO: 119702 - DNA, 38 bp, Artificial Sequence
  primer
gtaaaacgacggccagttcacagagcccttcaaattcc

SEQ ID NO: 119703 - DNA, 35 bp, Artificial Sequence
  primer
gtaaaacgacggccagttgcccttcttgcattgct

SEQ ID NO: 119704 - DNA, 22 bp, Artificial Sequence
  primer
caagcccaggtatctcttaggg

SEQ ID NO: 119705 - DNA, 39 bp, Artificial Sequence
  primer
gtaaaacgacggccagtgaacccagtctgtgatttcagc

SEQ ID NO: 119706 - DNA, 38 bp, Artificial Sequence
  primer
gtaaaacgacggccagttggcagaactgaaaggaaagg

SEQ ID NO: 119707 - DNA, 21 bp, Artificial Sequence
  primer
gagtgagaaggaaacccatgc

SEQ ID NO: 119708 - DNA, 39 bp, Artificial Sequence
  primer
gtaaaacgacggccagtcttcgaaaggtaagttcttcgg

SEQ ID NO: 119709 - DNA, 41 bp, Artificial Sequence
  primer
gtaaaacgacggccagtgttcatttaaattggtatttgccc

SEQ ID NO: 119710 - DNA, 38 bp, Artificial Sequence
  primer
gtaaaacgacggccagttcatgtgaatgccaacatttc

SEQ ID NO: 119711 - DNA, 42 bp, Artificial Sequence
  primer
gtaaaacgacggccagtccaagatgaagctattcattaaggg

SEQ ID NO: 119712 - DNA, 37 bp, Artificial Sequence
  primer
gtaaaacgacggccagtgctgagaaaccatggcctaa

SEQ ID NO: 119713 - DNA, 21 bp, Artificial Sequence
  primer
ccatacatcagaacccttggc

SEQ ID NO: 119714 - DNA, 22 bp, Artificial Sequence
  primer
aatgtgcactgaattccaacac

SEQ ID NO: 119715 - DNA, 20 bp, Artificial Sequence
  primer
cccaaagacagtgttcagcc

SEQ ID NO: 119716 - DNA, 41 bp, Artificial Sequence
  primer
gtaaaacgacggccagtcgagaagtgtgatcaatacgaacc

SEQ ID NO: 119717 - DNA, 43 bp, Artificial Sequence
  primer
gtaaaacgacggccagtccttctctcagatattgtctcaaacc

SEQ ID NO: 119718 - DNA, 21 bp, Artificial Sequence
  primer
aacccagtaagccaacaaatg

SEQ ID NO: 119719 - DNA, 22 bp, Artificial Sequence
  primer
tcaaaggaatttcttccaaacg

SEQ ID NO: 119720 - DNA, 38 bp, Artificial Sequence
  primer
gtaaaacgacggccagtaccaatctgttcataggcagc

SEQ ID NO: 119721 - DNA, 39 bp, Artificial Sequence
  primer
gtaaaacgacggccagtccaatttgttaagggagaaccc

SEQ ID NO: 119722 - DNA, 21 bp, Artificial Sequence
  primer
ggccaattaccttgattcctg

SEQ ID NO: 119723 - DNA, 21 bp, Artificial Sequence
  primer
agagcaagactgtgcctcaac

SEQ ID NO: 119724 - DNA, 37 bp, Artificial Sequence
  primer
gtaaaacgacggccagtcttcatggctctcctttccc

SEQ ID NO: 119725 - DNA, 21 bp, Artificial Sequence
  primer
acgtcttggtcctctgtcctc

SEQ ID NO: 119726 - DNA, 39 bp, Artificial Sequence
  primer
gtaaaacgacggccagttgactaatggtctccaaggacc

SEQ ID NO: 119727 - DNA, 21 bp, Artificial Sequence
  primer
acagcgaagtcactgcaaatg

SEQ ID NO: 119728 - DNA, 35 bp, Artificial Sequence
  primer
gtaaaacgacggccagtgatccgccctcccaaagt

SEQ ID NO: 119729 - DNA, 26 bp, Artificial Sequence
  primer
tttacaacatgaccattgagtaactg

SEQ ID NO: 119730 - DNA, 41 bp, Artificial Sequence
  primer
gtaaaacgacggccagtcaatttagattggttgaagcacaa

SEQ ID NO: 119731 - DNA, 21 bp, Artificial Sequence
  primer
tccaggaggatagagaaaccc

SEQ ID NO: 119732 - DNA, 21 bp, Artificial Sequence
  primer
acaccaagagatgctgcattg

SEQ ID NO: 119733 - DNA, 21 bp, Artificial Sequence
  primer
ttgtggatacacccacagacc

SEQ ID NO: 119734 - DNA, 21 bp, Artificial Sequence
  primer
aaagcaggaagccagtcagtg

SEQ ID NO: 119735 - DNA, 21 bp, Artificial Sequence
  primer
tggcagataactgtggaggtc

SEQ ID NO: 119736 - DNA, 38 bp, Artificial Sequence
  primer
gtaaaacgacggccagttcttatttcctccttgggctg

SEQ ID NO: 119737 - DNA, 21 bp, Artificial Sequence
  primer
acgagcagatctacccaggtc

SEQ ID NO: 119738 - DNA, 38 bp, Artificial Sequence
  primer
gtaaaacgacggccagtaaggtcaggaaggtagggtgg

SEQ ID NO: 119739 - DNA, 21 bp, Artificial Sequence
  primer
gacagtaacgtcagtgctcgg

SEQ ID NO: 119740 - DNA, 21 bp, Artificial Sequence
  primer
tccctacttctcacaatgggc

SEQ ID NO: 119741 - DNA, 21 bp, Artificial Sequence
  primer
cgttctctaggccctcaacag

SEQ ID NO: 119742 - DNA, 20 bp, Artificial Sequence
  primer
agcctgggtgacagtgagac

SEQ ID NO: 119743 - DNA, 21 bp, Artificial Sequence
  primer
gcagtagatgttaggccctgg

SEQ ID NO: 119744 - DNA, 18 bp, Artificial Sequence
  primer
accagggaggtggaggtc

SEQ ID NO: 119745 - DNA, 20 bp, Artificial Sequence
  primer
agctggagagagaaggcagg

SEQ ID NO: 119746 - DNA, 38 bp, Artificial Sequence
  primer
gtaaaacgacggccagttagcccaacttctggacaagc

SEQ ID NO: 119747 - DNA, 18 bp, Artificial Sequence
  primer
aggcaggagaatggcgtc

SEQ ID NO: 119748 - DNA, 21 bp, Artificial Sequence
  primer
cagtcaggtgcttactctggg

SEQ ID NO: 119749 - DNA, 19 bp, Artificial Sequence
  primer
ctcttgtggctcaggatgg

SEQ ID NO: 119750 - DNA, 21 bp, Artificial Sequence
  primer
gaaagtacgtctggtgggacg

SEQ ID NO: 119751 - DNA, 38 bp, Artificial Sequence
  primer
gtaaaacgacggccagtagcctgacagattcccaattc

SEQ ID NO: 119752 - DNA, 20 bp, Artificial Sequence
  primer
gcctgccagactgctcttag

SEQ ID NO: 119753 - DNA, 39 bp, Artificial Sequence
  primer
gtaaaacgacggccagtggattcaagagatgtggcaaag

SEQ ID NO: 119754 - DNA, 38 bp, Artificial Sequence
  primer
gtaaaacgacggccagtgacatcctaacagggccagac

SEQ ID NO: 119755 - DNA, 44 bp, Artificial Sequence
  primer
gtaaaacgacggccagtgcttaacagctctctttaacacaggta

SEQ ID NO: 119756 - DNA, 40 bp, Artificial Sequence
  primer
gtaaaacgacggccagttgctagattcaaattcatcctgc

SEQ ID NO: 119757 - DNA, 21 bp, Artificial Sequence
  primer
atttcttccaagagttgccct

SEQ ID NO: 119758 - DNA, 38 bp, Artificial Sequence
  primer
gtaaaacgacggccagtaagattaagtcagccaggccc

SEQ ID NO: 119759 - DNA, 36 bp, Artificial Sequence
  primer
gtaaaacgacggccagtacctggagttggcaacagg

SEQ ID NO: 119760 - DNA, 21 bp, Artificial Sequence
  primer
atgtttccgttgatgacctcc

SEQ ID NO: 119761 - DNA, 21 bp, Artificial Sequence
  primer
atcaacctcctcaacacaccc

SEQ ID NO: 119762 - DNA, 38 bp, Artificial Sequence
  primer
gtaaaacgacggccagttctctaaacacaaagtccggg

SEQ ID NO: 119763 - DNA, 21 bp, Artificial Sequence
  primer
atcttctggcccttgagtttg

SEQ ID NO: 119764 - DNA, 38 bp, Artificial Sequence
  primer
gtaaaacgacggccagtagagtctggcaccatcaaacc

SEQ ID NO: 119765 - DNA, 21 bp, Artificial Sequence
  primer
gacaagttggtgacacggatg

SEQ ID NO: 119766 - DNA, 36 bp, Artificial Sequence
  primer
gtaaaacgacggccagtacgagctaggacaggcgac

SEQ ID NO: 119767 - DNA, 37 bp, Artificial Sequence
  primer
gtaaaacgacggccagtaattggctcagggctattgg

SEQ ID NO: 119768 - DNA, 19 bp, Artificial Sequence
  primer
gcaacacctgtgcttgcag

SEQ ID NO: 119769 - DNA, 38 bp, Artificial Sequence
  primer
gtaaaacgacggccagtgaaaggacggtaggacaccag

SEQ ID NO: 119770 - DNA, 38 bp, Artificial Sequence
  primer
gtaaaacgacggccagtgggaagaagctccttggctac

SEQ ID NO: 119771 - DNA, 22 bp, Artificial Sequence
  primer
cacttgcaatactcttgcctcc

SEQ ID NO: 119772 - DNA, 22 bp, Artificial Sequence
  primer
gaaggaattaaccttgcttggg

SEQ ID NO: 119773 - DNA, 21 bp, Artificial Sequence
  primer
ctctggtgctgatcatttccc

SEQ ID NO: 119774 - DNA, 38 bp, Artificial Sequence
  primer
gtaaaacgacggccagtgagccctaccatttcatcagc

SEQ ID NO: 119775 - DNA, 21 bp, Artificial Sequence
  primer
ggctataggtgaagccctgtc

SEQ ID NO: 119776 - DNA, 22 bp, Artificial Sequence
  primer
cccggcaataaactcacataag

SEQ ID NO: 119777 - DNA, 38 bp, Artificial Sequence
  primer
gtaaaacgacggccagtcttagtgtccgtccaggaacc

SEQ ID NO: 119778 - DNA, 21 bp, Artificial Sequence
  primer
ttccacatctttcacagggag

SEQ ID NO: 119779 - DNA, 43 bp, Artificial Sequence
  primer
gtaaaacgacggccagtaagcactcatttaaaccatgaacttt

SEQ ID NO: 119780 - DNA, 38 bp, Artificial Sequence
  primer
gtaaaacgacggccagtcttaggccaagccataagctc

SEQ ID NO: 119781 - DNA, 19 bp, Artificial Sequence
  primer
ttgaggccctgaaacaagg

SEQ ID NO: 119782 - DNA, 24 bp, Artificial Sequence
  primer
ggagattcaaactagtcaagccac

SEQ ID NO: 119783 - DNA, 26 bp, Artificial Sequence
  primer
ggcttagggtacactctgtcaaatag

SEQ ID NO: 119784 - DNA, 21 bp, Artificial Sequence
  primer
aaagcccatttgagggtcttc

SEQ ID NO: 119785 - DNA, 24 bp, Artificial Sequence
  primer
aaggaagacactgcaagattaacg

SEQ ID NO: 119786 - DNA, 29 bp, Artificial Sequence
  primer
tctccttacgtaaaggtacaagagtattt

SEQ ID NO: 119787 - DNA, 38 bp, Artificial Sequence
  primer
gtaaaacgacggccagtaaataggaggcttctgttgcc

SEQ ID NO: 119788 - DNA, 23 bp, Artificial Sequence
  primer
agtcacacaggaagagtcaaagc

SEQ ID NO: 119789 - DNA, 21 bp, Artificial Sequence
  primer
ggttcagcctacagggacttc

SEQ ID NO: 119790 - DNA, 21 bp, Artificial Sequence
  primer
aaggacaagccaatcgaacac

SEQ ID NO: 119791 - DNA, 38 bp, Artificial Sequence
  primer
gtaaaacgacggccagttggcagctaatgactgactcc

SEQ ID NO: 119792 - DNA, 21 bp, Artificial Sequence
  primer
tccctagcctcaaggactcac

SEQ ID NO: 119793 - DNA, 38 bp, Artificial Sequence
  primer
gtaaaacgacggccagtaatcatccagccttcgacaag

SEQ ID NO: 119794 - DNA, 21 bp, Artificial Sequence
  primer
gtgtctgaacagctttctggg

SEQ ID NO: 119795 - DNA, 21 bp, Artificial Sequence
  primer
ccatgaatcacaagacctccc

SEQ ID NO: 119796 - DNA, 21 bp, Artificial Sequence
  primer
gaaagccagctgaaactggag

SEQ ID NO: 119797 - DNA, 21 bp, Artificial Sequence
  primer
tgactcatctgctctccttgc

SEQ ID NO: 119798 - DNA, 21 bp, Artificial Sequence
  primer
cagtcctctttcctctcctgg

SEQ ID NO: 119799 - DNA, 21 bp, Artificial Sequence
  primer
aagaatggttggcataggtgc

SEQ ID NO: 119800 - DNA, 38 bp, Artificial Sequence
  primer
gtaaaacgacggccagtactgaaattcaccatccaggg

SEQ ID NO: 119801 - DNA, 38 bp, Artificial Sequence
  primer
gtaaaacgacggccagtcccgatatacttcatgtgccc

SEQ ID NO: 119802 - DNA, 21 bp, Artificial Sequence
  primer
tgagctaagatcacgtcgctg

SEQ ID NO: 119803 - DNA, 21 bp, Artificial Sequence
  primer
caaatctggctccaaagatcc

SEQ ID NO: 119804 - DNA, 22 bp, Artificial Sequence
  primer
gagataacctttctcagctggc

SEQ ID NO: 119805 - DNA, 21 bp, Artificial Sequence
  primer
gttggcagtttcttcccattc

SEQ ID NO: 119806 - DNA, 21 bp, Artificial Sequence
  primer
cttgttatggaacggtgaccc

SEQ ID NO: 119807 - DNA, 21 bp, Artificial Sequence
  primer
gagttagtttcctgcccatgc

SEQ ID NO: 119808 - DNA, 23 bp, Artificial Sequence
  primer
tcaagacagggtgactgctaaag

SEQ ID NO: 119809 - DNA, 36 bp, Artificial Sequence
  primer
gtaaaacgacggccagtacctggccggtcttgattt

SEQ ID NO: 119810 - DNA, 37 bp, Artificial Sequence
  primer
gtaaaacgacggccagtacatttccggtctacctggc

SEQ ID NO: 119811 - DNA, 21 bp, Artificial Sequence
  primer
tcaattcccttgggaagacag

SEQ ID NO: 119812 - DNA, 21 bp, Artificial Sequence
  primer
caaagcagatgctccacaaac

SEQ ID NO: 119813 - DNA, 23 bp, Artificial Sequence
  primer
aaagaaactcatgtggtcactgg

SEQ ID NO: 119814 - DNA, 40 bp, Artificial Sequence
  primer
gtaaaacgacggccagtcagtttatacaacctagcctgcg

SEQ ID NO: 119815 - DNA, 21 bp, Artificial Sequence
  primer
acaccattgccctagttcagg

SEQ ID NO: 119816 - DNA, 21 bp, Artificial Sequence
  primer
cacaatggctacagagcttgc

SEQ ID NO: 119817 - DNA, 21 bp, Artificial Sequence
  primer
cacccagattctgaattccac

SEQ ID NO: 119818 - DNA, 18 bp, Artificial Sequence
  primer
cacctcctcactggaggc

SEQ ID NO: 119819 - DNA, 38 bp, Artificial Sequence
  primer
gtaaaacgacggccagtgatatctcccacctcgggaac

SEQ ID NO: 119820 - DNA, 36 bp, Artificial Sequence
  primer
gtaaaacgacggccagtcccgacgatatctcccacc

SEQ ID NO: 119821 - DNA, 38 bp, Artificial Sequence
  primer
gtaaaacgacggccagtaaggatctcctgcaacactcc

SEQ ID NO: 119822 - DNA, 38 bp, Artificial Sequence
  primer
gtaaaacgacggccagtaatctgacagacaccagcacc

SEQ ID NO: 119823 - DNA, 21 bp, Artificial Sequence
  primer
cttaagcgatcctcccacctc

SEQ ID NO: 119824 - DNA, 41 bp, Artificial Sequence
  primer
gtaaaacgacggccagttctcaggatttacttcaaagctgg

SEQ ID NO: 119825 - DNA, 41 bp, Artificial Sequence
  primer
gtaaaacgacggccagtgcttattagcgttctgcatactcc

SEQ ID NO: 119826 - DNA, 38 bp, Artificial Sequence
  primer
gtaaaacgacggccagtagatgctaagcgtatccaggg

SEQ ID NO: 119827 - DNA, 21 bp, Artificial Sequence
  primer
gcacaaataaggaaaggcacc

SEQ ID NO: 119828 - DNA, 21 bp, Artificial Sequence
  primer
ctgtccactaggagggaggtg

SEQ ID NO: 119829 - DNA, 21 bp, Artificial Sequence
  primer
aacaccctccaaacaatacgg

SEQ ID NO: 119830 - DNA, 38 bp, Artificial Sequence
  primer
gtaaaacgacggccagtaacacgttctgtgacctggag

SEQ ID NO: 119831 - DNA, 21 bp, Artificial Sequence
  primer
agtcaaatgctcactgttggg

SEQ ID NO: 119832 - DNA, 21 bp, Artificial Sequence
  primer
aaccctttcagcgcacaatac

SEQ ID NO: 119833 - DNA, 21 bp, Artificial Sequence
  primer
ctgttcaacacagaggcttgg

SEQ ID NO: 119834 - DNA, 38 bp, Artificial Sequence
  primer
gtaaaacgacggccagttcagttctcactgttcctgcg

SEQ ID NO: 119835 - DNA, 21 bp, Artificial Sequence
  primer
gaacagaaccagtgtcttcgg

SEQ ID NO: 119836 - DNA, 38 bp, Artificial Sequence
  primer
gtaaaacgacggccagttcaatggtctcctcttcccag

SEQ ID NO: 119837 - DNA, 21 bp, Artificial Sequence
  primer
aaaggaggtgcttcctcagtg

SEQ ID NO: 119838 - DNA, 20 bp, Artificial Sequence
  primer
cctcgtaacagacctcgcac

SEQ ID NO: 119839 - DNA, 38 bp, Artificial Sequence
  primer
gtaaaacgacggccagtagagcttacaaccctcctccc

SEQ ID NO: 119840 - DNA, 21 bp, Artificial Sequence
  primer
gctttgtccctggctgatatg

SEQ ID NO: 119841 - DNA, 21 bp, Artificial Sequence
  primer
tctcgagagtgttagggcacc

SEQ ID NO: 119842 - DNA, 38 bp, Artificial Sequence
  primer
gtaaaacgacggccagtcatccttgggaatgactctgg

SEQ ID NO: 119843 - DNA, 38 bp, Artificial Sequence
  primer
gtaaaacgacggccagtgagtgctggttccttcctgag

SEQ ID NO: 119844 - DNA, 38 bp, Artificial Sequence
  primer
gtaaaacgacggccagtagtgtgtccagcttccactcc

SEQ ID NO: 119845 - DNA, 21 bp, Artificial Sequence
  primer
acaaatatgcagcagaccagg

SEQ ID NO: 119846 - DNA, 38 bp, Artificial Sequence
  primer
gtaaaacgacggccagtaggcatgccagattctattcc

SEQ ID NO: 119847 - DNA, 21 bp, Artificial Sequence
  primer
atgaggtcagcaacattgagg

SEQ ID NO: 119848 - DNA, 21 bp, Artificial Sequence
  primer
gacaagatgtccatcccttgg

SEQ ID NO: 119849 - DNA, 38 bp, Artificial Sequence
  primer
gtaaaacgacggccagtcgtgccatccactatcatctc

SEQ ID NO: 119850 - DNA, 21 bp, Artificial Sequence
  primer
tctctgctgaatagcggaagg

SEQ ID NO: 119851 - DNA, 37 bp, Artificial Sequence
  primer
gtaaaacgacggccagtcaggtcagtcccgaaagatg

SEQ ID NO: 119852 - DNA, 21 bp, Artificial Sequence
  primer
aaggagggatctggtaggacc

SEQ ID NO: 119853 - DNA, 21 bp, Artificial Sequence
  primer
accacggctcaacatttcatc

SEQ ID NO: 119854 - DNA, 38 bp, Artificial Sequence
  primer
gtaaaacgacggccagtaaatgtctgaagccaagcgtc

SEQ ID NO: 119855 - DNA, 23 bp, Artificial Sequence
  primer
gacattaagaaagaggtccaccc

SEQ ID NO: 119856 - DNA, 21 bp, Artificial Sequence
  primer
catgtatgagaccaagcgtcc

SEQ ID NO: 119857 - DNA, 21 bp, Artificial Sequence
  primer
aaatagcccaagttggcaaag

SEQ ID NO: 119858 - DNA, 22 bp, Artificial Sequence
  primer
tcccactttgttctcatcaacc

SEQ ID NO: 119859 - DNA, 22 bp, Artificial Sequence
  primer
ttctgatccgttatgagcattg

SEQ ID NO: 119860 - DNA, 21 bp, Artificial Sequence
  primer
ccgacttcaggaaatcagtgg

SEQ ID NO: 119861 - DNA, 21 bp, Artificial Sequence
  primer
aagtctgacagcccaaacctc

SEQ ID NO: 119862 - DNA, 21 bp, Artificial Sequence
  primer
ctgcccattccacaattagtc

SEQ ID NO: 119863 - DNA, 39 bp, Artificial Sequence
  primer
gtaaaacgacggccagtctttgaagtgagcctctcaacc

SEQ ID NO: 119864 - DNA, 21 bp, Artificial Sequence
  primer
ttatgtcagcagcactccctc

SEQ ID NO: 119865 - DNA, 40 bp, Artificial Sequence
  primer
gtaaaacgacggccagttcgtttcctgcatctatcagttc

SEQ ID NO: 119866 - DNA, 21 bp, Artificial Sequence
  primer
ctgcctatccgggaatcatag

SEQ ID NO: 119867 - DNA, 38 bp, Artificial Sequence
  primer
gtaaaacgacggccagttgctgcttcctgtacaatgtg

SEQ ID NO: 119868 - DNA, 38 bp, Artificial Sequence
  primer
gtaaaacgacggccagtcgacacaaatttcccaaatgc

SEQ ID NO: 119869 - DNA, 38 bp, Artificial Sequence
  primer
gtaaaacgacggccagtatatgaaactccaatcggccc

SEQ ID NO: 119870 - DNA, 38 bp, Artificial Sequence
  primer
gtaaaacgacggccagtgtgctatacaacgctggcatc

SEQ ID NO: 119871 - DNA, 21 bp, Artificial Sequence
  primer
gtgcgagacacactgctcttc

SEQ ID NO: 119872 - DNA, 20 bp, Artificial Sequence
  primer
tgctcacaatgagcgatctg

SEQ ID NO: 119873 - DNA, 21 bp, Artificial Sequence
  primer
cagaggcacatgcgatcttac

SEQ ID NO: 119874 - DNA, 21 bp, Artificial Sequence
  primer
aactgcatggtgacataacgc

SEQ ID NO: 119875 - DNA, 38 bp, Artificial Sequence
  primer
gtaaaacgacggccagtcctccaccctgtagacacctc

SEQ ID NO: 119876 - DNA, 38 bp, Artificial Sequence
  primer
gtaaaacgacggccagtactttcccttcaaacttgccc

SEQ ID NO: 119877 - DNA, 25 bp, Artificial Sequence
  primer
aagttctaagggcaataatggattc

SEQ ID NO: 119878 - DNA, 42 bp, Artificial Sequence
  primer
gtaaaacgacggccagttcagcctattcatcacactatcaaa

SEQ ID NO: 119879 - DNA, 39 bp, Artificial Sequence
  primer
gtaaaacgacggccagttttctagtgttgggcatccttc

SEQ ID NO: 119880 - DNA, 35 bp, Artificial Sequence
  primer
gtaaaacgacggccagtgcaccaattgagccgttc

SEQ ID NO: 119881 - DNA, 38 bp, Artificial Sequence
  primer
gtaaaacgacggccagtgaagaggctttggttcagctc

SEQ ID NO: 119882 - DNA, 37 bp, Artificial Sequence
  primer
gtaaaacgacggccagtactccggtatccattgctcc

SEQ ID NO: 119883 - DNA, 21 bp, Artificial Sequence
  primer
aaagcaaggcagcatctcaag

SEQ ID NO: 119884 - DNA, 42 bp, Artificial Sequence
  primer
gtaaaacgacggccagtcggagactcaggtcagtcaattaag

SEQ ID NO: 119885 - DNA, 21 bp, Artificial Sequence
  primer
taaccttggcagggctaagag

SEQ ID NO: 119886 - DNA, 39 bp, Artificial Sequence
  primer
gtaaaacgacggccagtgaatcatcaaagcaaatcaggg

SEQ ID NO: 119887 - DNA, 21 bp, Artificial Sequence
  primer
caagtaagtctcctgtccggc

SEQ ID NO: 119888 - DNA, 38 bp, Artificial Sequence
  primer
gtaaaacgacggccagtgtagcacgccaacagaacaag

SEQ ID NO: 119889 - DNA, 22 bp, Artificial Sequence
  primer
gcctgggcaaactaacttactg

SEQ ID NO: 119890 - DNA, 38 bp, Artificial Sequence
  primer
gtaaaacgacggccagtaggctatctgcaaagcacaaa

SEQ ID NO: 119891 - DNA, 37 bp, Artificial Sequence
  primer
gtaaaacgacggccagtagctgctgcaagaaacaagc

SEQ ID NO: 119892 - DNA, 40 bp, Artificial Sequence
  primer
gtaaaacgacggccagttttcaagtaaatctgccttcacc

SEQ ID NO: 119893 - DNA, 38 bp, Artificial Sequence
  primer
gtaaaacgacggccagtgagtcctaattgcccatctgc

SEQ ID NO: 119894 - DNA, 20 bp, Artificial Sequence
  primer
ttccgttctttccaatcacg

SEQ ID NO: 119895 - DNA, 21 bp, Artificial Sequence
  primer
cagagtccctgttgttcctcc

SEQ ID NO: 119896 - DNA, 38 bp, Artificial Sequence
  primer
gtaaaacgacggccagtgtggaggcacaaggaggtatc

SEQ ID NO: 119897 - DNA, 38 bp, Artificial Sequence
  primer
gtaaaacgacggccagtacgaagtaaagggtcccgaac

SEQ ID NO: 119898 - DNA, 20 bp, Artificial Sequence
  primer
tgcagtgtgctgagattgtg

SEQ ID NO: 119899 - DNA, 38 bp, Artificial Sequence
  primer
gtaaaacgacggccagtctgctggtattgcctcttctg

SEQ ID NO: 119900 - DNA, 21 bp, Artificial Sequence
  primer
cctgcggacaagtcttaggtc

SEQ ID NO: 119901 - DNA, 38 bp, Artificial Sequence
  primer
gtaaaacgacggccagttgcctcagaactaaaggaggc

SEQ ID NO: 119902 - DNA, 39 bp, Artificial Sequence
  primer
gtaaaacgacggccagtaacgctgggtatctacacttgc

SEQ ID NO: 119903 - DNA, 24 bp, Artificial Sequence
  primer
tgaaacccatcttattacctctcg

SEQ ID NO: 119904 - DNA, 39 bp, Artificial Sequence
  primer
gtaaaacgacggccagtgctaagaatgaaaccagcaggc

SEQ ID NO: 119905 - DNA, 21 bp, Artificial Sequence
  primer
ctgaggcagcagtgagtcaag

SEQ ID NO: 119906 - DNA, 36 bp, Artificial Sequence
  primer
gtaaaacgacggccagtactacaggcaccagccacc

SEQ ID NO: 119907 - DNA, 22 bp, Artificial Sequence
  primer
acaacactttcaaaccgatgtc

SEQ ID NO: 119908 - DNA, 22 bp, Artificial Sequence
  primer
ccctttgaccctaattgactcc

SEQ ID NO: 119909 - DNA, 39 bp, Artificial Sequence
  primer
gtaaaacgacggccagtttagacccaactgcctgaagac

SEQ ID NO: 119910 - DNA, 21 bp, Artificial Sequence
  primer
aaagcatcaaggaccaaatga

SEQ ID NO: 119911 - DNA, 21 bp, Artificial Sequence
  primer
cccaaagttggaccactaagc

SEQ ID NO: 119912 - DNA, 18 bp, Artificial Sequence
  primer
catgcaccaccacgtctg

SEQ ID NO: 119913 - DNA, 38 bp, Artificial Sequence
  primer
gtaaaacgacggccagtacagttcagctctccactccc

SEQ ID NO: 119914 - DNA, 21 bp, Artificial Sequence
  primer
tattgatttggattgggatgg

SEQ ID NO: 119915 - DNA, 21 bp, Artificial Sequence
  primer
gacatttagggcacacagtgg

SEQ ID NO: 119916 - DNA, 21 bp, Artificial Sequence
  primer
cttgcccagggctttgtatag

SEQ ID NO: 119917 - DNA, 41 bp, Artificial Sequence
  primer
gtaaaacgacggccagtggatggaaatctcccacattatag

SEQ ID NO: 119918 - DNA, 24 bp, Artificial Sequence
  primer
ttcatctccactggaaactagtcc

SEQ ID NO: 119919 - DNA, 21 bp, Artificial Sequence
  primer
taaaccaacccgagatgaagc

SEQ ID NO: 119920 - DNA, 38 bp, Artificial Sequence
  primer
gtaaaacgacggccagtactttgccctgacacagatgg

SEQ ID NO: 119921 - DNA, 21 bp, Artificial Sequence
  primer
acacagaggattaaggccagg

SEQ ID NO: 119922 - DNA, 38 bp, Artificial Sequence
  primer
gtaaaacgacggccagtagaaggaagtcccacctctgg

SEQ ID NO: 119923 - DNA, 38 bp, Artificial Sequence
  primer
gtaaaacgacggccagttccctgatgtgggaaagactc

SEQ ID NO: 119924 - DNA, 38 bp, Artificial Sequence
  primer
gtaaaacgacggccagtccttcctcctcaagtcactgc

SEQ ID NO: 119925 - DNA, 38 bp, Artificial Sequence
  primer
gtaaaacgacggccagtaaagatccagggacttgggag

SEQ ID NO: 119926 - DNA, 21 bp, Artificial Sequence
  primer
caagtcactccaccacctcag

SEQ ID NO: 119927 - DNA, 38 bp, Artificial Sequence
  primer
gtaaaacgacggccagtatttccactgtgtgagatgcc

SEQ ID NO: 119928 - DNA, 38 bp, Artificial Sequence
  primer
gtaaaacgacggccagtgagccgtagctggagtagcag

SEQ ID NO: 119929 - DNA, 38 bp, Artificial Sequence
  primer
gtaaaacgacggccagtacctctaccgtccaaccacac

SEQ ID NO: 119930 - DNA, 38 bp, Artificial Sequence
  primer
gtaaaacgacggccagtctttggcacagatactgccac

SEQ ID NO: 119931 - DNA, 20 bp, Artificial Sequence
  primer
acaccactgccctcagactc

SEQ ID NO: 119932 - DNA, 21 bp, Artificial Sequence
  primer
aggcttccactgatctgcaag

SEQ ID NO: 119933 - DNA, 38 bp, Artificial Sequence
  primer
gtaaaacgacggccagtttattggcctgcaaagaggac

SEQ ID NO: 119934 - DNA, 21 bp, Artificial Sequence
  primer
cactactacacgcctccaggg

SEQ ID NO: 119935 - DNA, 21 bp, Artificial Sequence
  primer
aaagaagcaaagagggcacag

SEQ ID NO: 119936 - DNA, 21 bp, Artificial Sequence
  primer
gctggactcaaggagtcttgg

SEQ ID NO: 119937 - DNA, 38 bp, Artificial Sequence
  primer
gtaaaacgacggccagtgtcctgagccagagaaatccc

SEQ ID NO: 119938 - DNA, 21 bp, Artificial Sequence
  primer
gtcccacctataactgcaggc

SEQ ID NO: 119939 - DNA, 21 bp, Artificial Sequence
  primer
gatgatgtcagggaaggcaag

SEQ ID NO: 119940 - DNA, 21 bp, Artificial Sequence
  primer
ccagacacgtggcactaacag

SEQ ID NO: 119941 - DNA, 21 bp, Artificial Sequence
  primer
ctccctctacagctggcagtc

SEQ ID NO: 119942 - DNA, 21 bp, Artificial Sequence
  primer
cacaaacctcctctattgccc

SEQ ID NO: 119943 - DNA, 21 bp, Artificial Sequence
  primer
tttccaacctatggcaacaac

SEQ ID NO: 119944 - DNA, 21 bp, Artificial Sequence
  primer
tcagtcttcccagcaaacaag

SEQ ID NO: 119945 - DNA, 38 bp, Artificial Sequence
  primer
gtaaaacgacggccagtgtcactgtctgacccagaccc

SEQ ID NO: 119946 - DNA, 21 bp, Artificial Sequence
  primer
ttatgcaaggttccaagggtc

SEQ ID NO: 119947 - DNA, 21 bp, Artificial Sequence
  primer
ctccaaaccagggtatccaac

SEQ ID NO: 119948 - DNA, 38 bp, Artificial Sequence
  primer
gtaaaacgacggccagttcctgtcatcaccatcactcc

SEQ ID NO: 119949 - DNA, 38 bp, Artificial Sequence
  primer
gtaaaacgacggccagtagaggtaaggttgccaacagg

SEQ ID NO: 119950 - DNA, 20 bp, Artificial Sequence
  primer
gggcccttcagtcttcattc

SEQ ID NO: 119951 - DNA, 21 bp, Artificial Sequence
  primer
ggtatttctgcagcagcttcg

SEQ ID NO: 119952 - DNA, 21 bp, Artificial Sequence
  primer
ggaaagaatgaaacccagagg

SEQ ID NO: 119953 - DNA, 21 bp, Artificial Sequence
  primer
catcacactacaggcacccac

SEQ ID NO: 119954 - DNA, 38 bp, Artificial Sequence; identical to SEQ ID NO: 119924
  primer

SEQ ID NO: 119955 - DNA, 21 bp, Artificial Sequence
  primer
acaagacaagccaactctggg

SEQ ID NO: 119956 - DNA, 21 bp, Artificial Sequence
  primer
aaattgcagcccattaagtcg

SEQ ID NO: 119957 - DNA, 42 bp, Artificial Sequence
  primer
gtaaaacgacggccagtgatggctattgccttaattataccg

SEQ ID NO: 119958 - DNA, 21 bp, Artificial Sequence
  primer
tactctgggcatgaaccttgc

SEQ ID NO: 119959 - DNA, 22 bp, Artificial Sequence
  primer
ttgctaagcactcccatttacc

SEQ ID NO: 119960 - DNA, 21 bp, Artificial Sequence
  primer
ttggaaattaggaggcgtctg

SEQ ID NO: 119961 - DNA, 21 bp, Artificial Sequence
  primer
agcaatggctctctgttcctc

SEQ ID NO: 119962 - DNA, 43 bp, Artificial Sequence
  primer
gtaaaacgacggccagtcaacctccctcttagatgaataattg

SEQ ID NO: 119963 - DNA, 21 bp, Artificial Sequence
  primer
atggctaaatatggcaatccc

SEQ ID NO: 119964 - DNA, 21 bp, Artificial Sequence
  primer
tggtgttctcgcaactctacg

SEQ ID NO: 119965 - DNA, 19 bp, Artificial Sequence
  primer
gggtgggtgaggaggaaac

SEQ ID NO: 119966 - DNA, 38 bp, Artificial Sequence
  primer
gtaaaacgacggccagttcctggaccagtaccaattcc

SEQ ID NO: 119967 - DNA, 21 bp, Artificial Sequence
  primer
gtaccaaagggatgagccaag

SEQ ID NO: 119968 - DNA, 24 bp, Artificial Sequence
  primer
caagaactccagcataaagtcctc

SEQ ID NO: 119969 - DNA, 20 bp, Artificial Sequence
  primer
tttgagaccaagctgaggtg

SEQ ID NO: 119970 - DNA, 38 bp, Artificial Sequence
  primer
gtaaaacgacggccagttgacagcctcatttgcatttc

SEQ ID NO: 119971 - DNA, 20 bp, Artificial Sequence
  primer
tccagtttgggacactggtc

SEQ ID NO: 119972 - DNA, 27 bp, Artificial Sequence
  primer
gactgtctgacctacataaatccactc

SEQ ID NO: 119973 - DNA, 20 bp, Artificial Sequence
  primer
gaatctgtttcatcgctggg

SEQ ID NO: 119974 - DNA, 26 bp, Artificial Sequence
  primer
agaaagcttcttcttcaataatttcc

SEQ ID NO: 119975 - DNA, 41 bp, Artificial Sequence
  primer
gtaaaacgacggccagtagtgcagaatgaaatgtacaggtg

SEQ ID NO: 119976 - DNA, 21 bp, Artificial Sequence
  primer
tcgcagtggttaggtcaaatg

SEQ ID NO: 119977 - DNA, 43 bp, Artificial Sequence
  primer
gtaaaacgacggccagtataaatcatctttggaacaaacttcc

SEQ ID NO: 119978 - DNA, 38 bp, Artificial Sequence
  primer
gtaaaacgacggccagttaccacaattcatccacccag

SEQ ID NO: 119979 - DNA, 38 bp, Artificial Sequence
  primer
gtaaaacgacggccagttaaaccaacccaccaagcaac

SEQ ID NO: 119980 - DNA, 21 bp, Artificial Sequence
  primer
acatgcccatacaaatcctcc

SEQ ID NO: 119981 - DNA, 21 bp, Artificial Sequence
  primer
agatattcgaggctgcgagac

SEQ ID NO: 119982 - DNA, 21 bp, Artificial Sequence
  primer
taaagggcagtttaaggcagc

SEQ ID NO: 119983 - DNA, 39 bp, Artificial Sequence
  primer
gtaaaacgacggccagtctccaattcaagagtcaatggc

SEQ ID NO: 119984 - DNA, 37 bp, Artificial Sequence
  primer
gtaaaacgacggccagttcatgttcagcaagcacgag

SEQ ID NO: 119985 - DNA, 38 bp, Artificial Sequence
  primer
gtaaaacgacggccagtgcattcattcgatgtttctgg

SEQ ID NO: 119986 - DNA, 19 bp, Artificial Sequence
  primer
tgttagccactgtgcctgg

SEQ ID NO: 119987 - DNA, 41 bp, Artificial Sequence
  primer
gtaaaacgacggccagtcctctttcttccatccagtatctc

SEQ ID NO: 119988 - DNA, 42 bp, Artificial Sequence
  primer
gtaaaacgacggccagtcaacagtgtttagggaaacaaattc

SEQ ID NO: 119989 - DNA, 21 bp, Artificial Sequence
  primer
gctgtcttgccatgaggtagg

SEQ ID NO: 119990 - DNA, 26 bp, Artificial Sequence
  primer
accctctagacctggtaactattctg

SEQ ID NO: 119991 - DNA, 40 bp, Artificial Sequence
  primer
gtaaaacgacggccagttctgggaagaatgtgtagtgagg

SEQ ID NO: 119992 - DNA, 39 bp, Artificial Sequence
  primer
gtaaaacgacggccagttccctcttaaggtagcagggag

SEQ ID NO: 119993 - DNA, 21 bp, Artificial Sequence
  primer
gaacactgacaatgagacggg

SEQ ID NO: 119994 - DNA, 21 bp, Artificial Sequence
  primer
aaacaacaggacatccttccc

SEQ ID NO: 119995 - DNA, 41 bp, Artificial Sequence
  primer
gtaaaacgacggccagtctctattctttgggctgttctttc

SEQ ID NO: 119996 - DNA, 26 bp, Artificial Sequence
  primer
ttgcaactattgtaaattgtgtgtgt

SEQ ID NO: 119997 - DNA, 22 bp, Artificial Sequence
  primer
gactatgggaatgcgctgtaag

SEQ ID NO: 119998 - DNA, 22 bp, Artificial Sequence
  primer
ccaaattcaccacccaattatg

SEQ ID NO: 119999 - DNA, 22 bp, Artificial Sequence
  primer
ttcagatgctggtatgtgttgc

SEQ ID NO: 120000 - DNA, 22 bp, Artificial Sequence
  primer
cacctgatttagaccagaacca

SEQ ID NO: 120001 - DNA, 21 bp, Artificial Sequence
  primer
cctttatgccctagcacaatc

SEQ ID NO: 120002 - DNA, 21 bp, Artificial Sequence
  primer
agtctccaaaggcgataatgg

SEQ ID NO: 120003 - DNA, 38 bp, Artificial Sequence
  primer
gtaaaacgacggccagtcttgcaccctgagacctaagc

SEQ ID NO: 120004 - DNA, 36 bp, Artificial Sequence
  primer
gtaaaacgacggccagtaccacacagttggagtggc

SEQ ID NO: 120005 - DNA, 43 bp, Artificial Sequence
  primer
gtaaaacgacggccagttgaactgataggtaagcgaattaagg

SEQ ID NO: 120006 - DNA, 21 bp, Artificial Sequence
  primer
agcagctatttgtctccacgc

SEQ ID NO: 120007 - DNA, 41 bp, Artificial Sequence
  primer
gtaaaacgacggccagtccctaaatcatctctaagtcctgg

SEQ ID NO: 120008 - DNA, 37 bp, Artificial Sequence
  primer
gtaaaacgacggccagtgattggcgaagacgtgaaac

SEQ ID NO: 120009 - DNA, 20 bp, Artificial Sequence
  primer
tacttacacgttggaggccg

SEQ ID NO: 120010 - DNA, 22 bp, Artificial Sequence
  primer
ccacggttcctcacttaacttg

SEQ ID NO: 120011 - DNA, 23 bp, Artificial Sequence
  primer
aggacatctaaaccacagacagc

SEQ ID NO: 120012 - DNA, 19 bp, Artificial Sequence
  primer
cgtgcccagtctcccttac

SEQ ID NO: 120013 - DNA, 38 bp, Artificial Sequence
  primer
gtaaaacgacggccagtgtttcaacatttccacccacc

SEQ ID NO: 120014 - DNA, 21 bp, Artificial Sequence
  primer
cacatagtgcctggaatcacg

SEQ ID NO: 120015 - DNA, 21 bp, Artificial Sequence
  primer
ctcagaggcttgtaaggtggg

SEQ ID NO: 120016 - DNA, 22 bp, Artificial Sequence
  primer
ttcagggagctgagatcatacc

SEQ ID NO: 120017 - DNA, 38 bp, Artificial Sequence
  primer
gtaaaacgacggccagtcacagtttccatcaccctttc

SEQ ID NO: 120018 - DNA, 23 bp, Artificial Sequence
  primer
tttgcacatacatgttgcacttc

SEQ ID NO: 120019 - DNA, 21 bp, Artificial Sequence
  primer
gaaagtcagcactgttggcag

SEQ ID NO: 120020 - DNA, 21 bp, Artificial Sequence
  primer
ataccaaacaccctctcctgc

SEQ ID NO: 120021 - DNA, 21 bp, Artificial Sequence
  primer
tggagaagcaagagggatagc

SEQ ID NO: 120022 - DNA, 21 bp, Artificial Sequence
  primer
tcaacaggaaggatagggagg

SEQ ID NO: 120023 - DNA, 20 bp, Artificial Sequence
  primer
gcccaagaagggaatgctac

SEQ ID NO: 120024 - DNA, 21 bp, Artificial Sequence
  primer
tatgcagtcacttggcctgag

SEQ ID NO: 120025 - DNA, 39 bp, Artificial Sequence
  primer
gtaaaacgacggccagtaaacctgcctgagagatcattt

SEQ ID NO: 120026 - DNA, 42 bp, Artificial Sequence
  primer
gtaaaacgacggccagtggctatagctttggtgacaacttag

SEQ ID NO: 120027 - DNA, 38 bp, Artificial Sequence
  primer
gtaaaacgacggccagtgaccaggaaccctcaaatgac

SEQ ID NO: 120028 - DNA, 21 bp, Artificial Sequence
  primer
agctttgatgccttgagcttc

SEQ ID NO: 120029 - DNA, 40 bp, Artificial Sequence
  primer
gtaaaacgacggccagttgaagatggaacgagtgattaca

SEQ ID NO: 120030 - DNA, 38 bp, Artificial Sequence
  primer
gtaaaacgacggccagtgaaggaggcgtcatcatcttc

SEQ ID NO: 120031 - DNA, 20 bp, Artificial Sequence
  primer
accaaccttctgcagctgtg

SEQ ID NO: 120032 - DNA, 41 bp, Artificial Sequence
  primer
gtaaaacgacggccagttcaagtgtctttatacccatggac

SEQ ID NO: 120033 - DNA, 41 bp, Artificial Sequence
  primer
gtaaaacgacggccagttgtatcgagcaatctgttcttgag

SEQ ID NO: 120034 - DNA, 22 bp, Artificial Sequence
  primer
tgcaaattccattctccttctg

SEQ ID NO: 120035 - DNA, 27 bp, Artificial Sequence
  primer
ttacaatattcatagggtagaacccag

SEQ ID NO: 120036 - DNA, 35 bp, Artificial Sequence
  primer
gtaaaacgacggccagtgaaagagggccatccagc

SEQ ID NO: 120037 - DNA, 38 bp, Artificial Sequence
  primer
gtaaaacgacggccagtcatggcaaaggagagaacaag

SEQ ID NO: 120038 - DNA, 26 bp, Artificial Sequence
  primer
gctgttcaaagcctttagttgtagag

SEQ ID NO: 120039 - DNA, 38 bp, Artificial Sequence
  primer
gtaaaacgacggccagttgtacatgtgtgtgacggagc

SEQ ID NO: 120040 - DNA, 40 bp, Artificial Sequence
  primer
gtaaaacgacggccagttgaatggtgagtatatggagctg

SEQ ID NO: 120041 - DNA, 38 bp, Artificial Sequence
  primer
gtaaaacgacggccagtttctgcattccacattaaggg

SEQ ID NO: 120042 - DNA, 21 bp, Artificial Sequence
  primer
tgatgcaaggctgctacaaac

SEQ ID NO: 120043 - DNA, 42 bp, Artificial Sequence
  primer
gtaaaacgacggccagtaagtaattgctgtcaacagaggaaa

SEQ ID NO: 120044 - DNA, 21 bp, Artificial Sequence
  primer
atctatagtggtgcccatccc

SEQ ID NO: 120045 - DNA, 39 bp, Artificial Sequence
  primer
gtaaaacgacggccagtcagctttcaaagtgaggaaacc

SEQ ID NO: 120046 - DNA, 38 bp, Artificial Sequence
  primer
gtaaaacgacggccagtaatggcaggcttcacaaagac

SEQ ID NO: 120047 - DNA, 38 bp, Artificial Sequence
  primer
gtaaaacgacggccagttgtatcaggtaatggcgatgg

SEQ ID NO: 120048 - DNA, 38 bp, Artificial Sequence
  primer
gtaaaacgacggccagtttcaattctcacatcgaaggc

SEQ ID NO: 120049 - DNA, 38 bp, Artificial Sequence
  primer
gtaaaacgacggccagtgctgtttacagccctttctgg

SEQ ID NO: 120050 - DNA, 21 bp, Artificial Sequence
  primer
gcacaaagctgtgttggtacg

SEQ ID NO: 120051 - DNA, 37 bp, Artificial Sequence
  primer
gtaaaacgacggccagtgaagcccaaggagctacagg

SEQ ID NO: 120052 - DNA, 21 bp, Artificial Sequence
  primer
agggagaggtgagtgaacagg

SEQ ID NO: 120053 - DNA, 21 bp, Artificial Sequence
  primer
ttggcctccaggagagtaaag

SEQ ID NO: 120054 - DNA, 38 bp, Artificial Sequence
  primer
gtaaaacgacggccagtctaagcctgatcccatccatc

SEQ ID NO: 120055 - DNA, 20 bp, Artificial Sequence
  primer
cagtccctgaagtgctgtcc

SEQ ID NO: 120056 - DNA, 38 bp, Artificial Sequence
  primer
gtaaaacgacggccagtagccctctgaaagaacaggtg

SEQ ID NO: 120057 - DNA, 21 bp, Artificial Sequence
  primer
ctggccataagcacctaggac

SEQ ID NO: 120058 - DNA, 38 bp, Artificial Sequence
  primer
gtaaaacgacggccagtgtgtcgaatagggaggtgagg

SEQ ID NO: 120059 - DNA, 38 bp, Artificial Sequence
  primer
gtaaaacgacggccagtagtccatccaacgtttgttcc

SEQ ID NO: 120060 - DNA, 21 bp, Artificial Sequence
  primer
agatcatcaggcatagggacc

SEQ ID NO: 120061 - DNA, 21 bp, Artificial Sequence
  primer
gacctggacttgaacccagag

SEQ ID NO: 120062 - DNA, 18 bp, Artificial Sequence
  primer
ctgagggcgaaggtgctc

SEQ ID NO: 120063 - DNA, 20 bp, Artificial Sequence
  primer
tttcccgtttcacagaggtg

SEQ ID NO: 120064 - DNA, 20 bp, Artificial Sequence
  primer
ctcctagggtctagccacgg

SEQ ID NO: 120065 - DNA, 20 bp, Artificial Sequence
  primer
agccaaggagcatcaaacac

SEQ ID NO: 120066 - DNA, 38 bp, Artificial Sequence
  primer
gtaaaacgacggccagttcctgctctttgctccaattc

SEQ ID NO: 120067 - DNA, 38 bp, Artificial Sequence
  primer
gtaaaacgacggccagtttgctaaagttgcctgtgctg

SEQ ID NO: 120068 - DNA, 21 bp, Artificial Sequence
  primer
agtggttatttgcaaggctgc

SEQ ID NO: 120069 - DNA, 20 bp, Artificial Sequence
  primer
gggtgtggtgtggttgagac

SEQ ID NO: 120070 - DNA, 21 bp, Artificial Sequence
  primer
ggagagctgacatttgatccc

SEQ ID NO: 120071 - DNA, 37 bp, Artificial Sequence
  primer
gtaaaacgacggccagtgaggatggacctatggaggg

SEQ ID NO: 120072 - DNA, 21 bp, Artificial Sequence
  primer
agctctcaagaggaaggaggg

SEQ ID NO: 120073 - DNA, 38 bp, Artificial Sequence
  primer
gtaaaacgacggccagtttcctggactcgagtgatctg

SEQ ID NO: 120074 - DNA, 38 bp, Artificial Sequence
  primer
gtaaaacgacggccagttacatgctgcattctgaaccc

SEQ ID NO: 120075 - DNA, 21 bp, Artificial Sequence
  primer
tgttggtgaagtttcctgtgc

SEQ ID NO: 120076 - DNA, 21 bp, Artificial Sequence
  primer
gactacagcttgtgtctcggc

SEQ ID NO: 120077 - DNA, 22 bp, Artificial Sequence
  primer
aataggccagagctcctttctc

SEQ ID NO: 120078 - DNA, 21 bp, Artificial Sequence
  primer
cccaggataacatgtgaggtg

SEQ ID NO: 120079 - DNA, 37 bp, Artificial Sequence
  primer
gtaaaacgacggccagtatggacctatggagggatgg

SEQ ID NO: 120080 - DNA, 21 bp, Artificial Sequence
  primer
agctctcaagaggaaggaggg

SEQ ID NO: 120081 - DNA, 38 bp, Artificial Sequence
  primer
gtaaaacgacggccagtcgcctgacctatttctggttc

SEQ ID NO: 120082 - DNA, 38 bp, Artificial Sequence
  primer
gtaaaacgacggccagtcatagcatgtcatgggactca

SEQ ID NO: 120083 - DNA, 38 bp, Artificial Sequence
  primer
gtaaaacgacggccagtgagggttacagatgaaacggg

SEQ ID NO: 120084 - DNA, 21 bp, Artificial Sequence
  primer
ttgtactcacccaacaccacc

SEQ ID NO: 120085 - DNA, 21 bp, Artificial Sequence
  primer
tgtccctatgtccctacgtcc

SEQ ID NO: 120086 - DNA, 21 bp, Artificial Sequence
  primer
tccggtcttggtgttaccttc

SEQ ID NO: 120087 - DNA, 21 bp, Artificial Sequence
  primer
aagatccttcctccaccttcc

SEQ ID NO: 120088 - DNA, 38 bp, Artificial Sequence
  primer
gtaaaacgacggccagtaggatccgatgtttctcacct

SEQ ID NO: 120089 - DNA, 38 bp, Artificial Sequence
  primer
gtaaaacgacggccagtcacagcaactcccttctctcc

SEQ ID NO: 120090 - DNA, 21 bp, Artificial Sequence
  primer
ctcctgtggaaccaggcatag

SEQ ID NO: 120091 - DNA, 38 bp, Artificial Sequence
  primer
gtaaaacgacggccagtcagtgagggttacagacggaa

SEQ ID NO: 120092 - DNA, 20 bp, Artificial Sequence
  primer
ctgactggctacctccctcc

SEQ ID NO: 120093 - DNA, 21 bp, Artificial Sequence
  primer
aaggctcttctggcttcaatc

SEQ ID NO: 120094 - DNA, 21 bp, Artificial Sequence
  primer
ttggtgttaccttcaacctgc

SEQ ID NO: 120095 - DNA, 21 bp, Artificial Sequence
  primer
cccaagtcatgtcagtgtgtg

SEQ ID NO: 120096 - DNA, 38 bp, Artificial Sequence
  primer
gtaaaacgacggccagtccaggatccgatgtttctcac

SEQ ID NO: 120097 - DNA, 38 bp, Artificial Sequence
  primer
gtaaaacgacggccagttcttcgtatgaaagggttgga

SEQ ID NO: 120098 - DNA, 20 bp, Artificial Sequence
  primer
aagtgggatgcaaccatcag

SEQ ID NO: 120099 - DNA, 38 bp, Artificial Sequence
  primer
gtaaaacgacggccagtttctgtgaaagaggcgaaatg

SEQ ID NO: 120100 - DNA, 21 bp, Artificial Sequence
  primer
tacaggcacatgacaccacac

SEQ ID NO: 120101 - DNA, 38 bp, Artificial Sequence
  primer
gtaaaacgacggccagtttctgcaatgccatctgtttc

SEQ ID NO: 120102 - DNA, 37 bp, Artificial Sequence
  primer
gtaaaacgacggccagtagccaattcatcaatgcagc

SEQ ID NO: 120103 - DNA, 38 bp, Artificial Sequence
  primer
gtaaaacgacggccagttgaaccacatgtgtgaagcag

SEQ ID NO: 120104 - DNA, 39 bp, Artificial Sequence
  primer
gtaaaacgacggccagtggcgagcaacctttaacctaag

SEQ ID NO: 120105 - DNA, 20 bp, Artificial Sequence
  primer
gatcacctgagcccagaagg

SEQ ID NO: 120106 - DNA, 38 bp, Artificial Sequence
  primer
gtaaaacgacggccagtggagggcagaagactgatttg

SEQ ID NO: 120107 - DNA, 21 bp, Artificial Sequence
  primer
ctcgtggtgatgaagcatttg

SEQ ID NO: 120108 - DNA, 37 bp, Artificial Sequence
  primer
gtaaaacgacggccagtagggcaggagccatatcttc

SEQ ID NO: 120109 - DNA, 21 bp, Artificial Sequence
  primer
aagcccaggaagaaggatctg

SEQ ID NO: 120110 - DNA, 39 bp, Artificial Sequence
  primer
gtaaaacgacggccagtggtaacaggagtgcctaccctc

SEQ ID NO: 120111 - DNA, 37 bp, Artificial Sequence
  primer
gtaaaacgacggccagtcaaggcctctgtgaaatgtg

SEQ ID NO: 120112 - DNA, 38 bp, Artificial Sequence
  primer
gtaaaacgacggccagtccaaactgttccacgtccttc

SEQ ID NO: 120113 - DNA, 21 bp, Artificial Sequence
  primer
cagaaacacagctcttgccac

SEQ ID NO: 120114 - DNA, 38 bp, Artificial Sequence
  primer
gtaaaacgacggccagtcccacagaaagtttaggcagg

SEQ ID NO: 120115 - DNA, 21 bp, Artificial Sequence
  primer
acggagctggtacttgaggag

SEQ ID NO: 120116 - DNA, 37 bp, Artificial Sequence
  primer
gtaaaacgacggccagtcagccaagcccattcattag

SEQ ID NO: 120117 - DNA, 38 bp, Artificial Sequence
  primer
gtaaaacgacggccagtcaccagcactccacttaatgc

SEQ ID NO: 120118 - DNA, 38 bp, Artificial Sequence
  primer
gtaaaacgacggccagttcgacatgacaagtgacaggg

SEQ ID NO: 120119 - DNA, 21 bp, Artificial Sequence
  primer
gcgcagaaggactatgttgag

SEQ ID NO: 120120 - DNA, 21 bp, Artificial Sequence
  primer
ctggttgtggtactgctggag

SEQ ID NO: 120121 - DNA, 37 bp, Artificial Sequence
  primer
gtaaaacgacggccagtccatctgggaccatgtcaag

SEQ ID NO: 120122 - DNA, 21 bp, Artificial Sequence
  primer
gtctgaaactgaaagggtggg

SEQ ID NO: 120123 - DNA, 38 bp, Artificial Sequence
  primer
gtaaaacgacggccagtttcctggtctcaacactcagc

SEQ ID NO: 120124 - DNA, 21 bp, Artificial Sequence
  primer
aataaaggccaagagcctgtg

SEQ ID NO: 120125 - DNA, 21 bp, Artificial Sequence
  primer
aactccagctgaccgtcctac

SEQ ID NO: 120126 - DNA, 21 bp, Artificial Sequence
  primer
ccgtgctcttcagcttctacc

SEQ ID NO: 120127 - DNA, 39 bp, Artificial Sequence
  primer
gtaaaacgacggccagtcagagtcacaggcaaaggagac

SEQ ID NO: 120128 - DNA, 21 bp, Artificial Sequence
  primer
cccttggagagtgactgtgag

SEQ ID NO: 120129 - DNA, 21 bp, Artificial Sequence
  primer
atcaaacggtgatctgccttc

SEQ ID NO: 120130 - DNA, 22 bp, Artificial Sequence
  primer
tggtttctattctgtggctgtg

SEQ ID NO: 120131 - DNA, 24 bp, Artificial Sequence
  primer
tcagacaaagacaaacacttgtga

SEQ ID NO: 120132 - DNA, 24 bp, Artificial Sequence
  primer
gcagcagtgaattatttacaagca

SEQ ID NO: 120133 - DNA, 23 bp, Artificial Sequence
  primer
cccaggtaactgtttatatgggc

SEQ ID NO: 120134 - DNA, 22 bp, Artificial Sequence
  primer
ttctggcccacatatacctttg

SEQ ID NO: 120135 - DNA, 39 bp, Artificial Sequence
  primer
gtaaaacgacggccagtaaagcaaaccagagatcctgtc

SEQ ID NO: 120136 - DNA, 38 bp, Artificial Sequence
  primer
gtaaaacgacggccagtcgtcgtaacgcaatacgaaac

SEQ ID NO: 120137 - DNA, 42 bp, Artificial Sequence
  primer
gtaaaacgacggccagtcccatctcaacactgacttacaaag

SEQ ID NO: 120138 - DNA, 35 bp, Artificial Sequence
  primer
gtaaaacgacggccagtcccgaggcttggtcctac

SEQ ID NO: 120139 - DNA, 38 bp, Artificial Sequence
  primer
gtaaaacgacggccagttcacatccctagaccacctcc

SEQ ID NO: 120140 - DNA, 38 bp, Artificial Sequence
  primer
gtaaaacgacggccagtgagtcctgaaaggcagtggac

SEQ ID NO: 120141 - DNA, 21 bp, Artificial Sequence
  primer
ctcaatcctcttgtcaaagcg

SEQ ID NO: 120142 - DNA, 21 bp, Artificial Sequence
  primer
cctgacagataggctccttgg

SEQ ID NO: 120143 - DNA, 38 bp, Artificial Sequence
  primer
gtaaaacgacggccagtatggccatgctactccaagac

SEQ ID NO: 120144 - DNA, 20 bp, Artificial Sequence
  primer
cctgtgctgtctctcttggg

SEQ ID NO: 120145 - DNA, 21 bp, Artificial Sequence
  primer
ctgcctgtgctgtctctcttg

SEQ ID NO: 120146 - DNA, 39 bp, Artificial Sequence
  primer
gtaaaacgacggccagtgcaagcataagactggtcaagg

SEQ ID NO: 120147 - DNA, 36 bp, Artificial Sequence
  primer
gtaaaacgacggccagtttcaggtgcaccatcacac

SEQ ID NO: 120148 - DNA, 38 bp, Artificial Sequence
  primer
gtaaaacgacggccagtcccacatagcctggatttacc

SEQ ID NO: 120149 - DNA, 21 bp, Artificial Sequence
  primer
tttaagcagccatcagccttc

SEQ ID NO: 120150 - DNA, 21 bp, Artificial Sequence
  primer
aggaatggaaactgaggctcg

SEQ ID NO: 120151 - DNA, 21 bp, Artificial Sequence
  primer
aatttgacatgctggtggaag

SEQ ID NO: 120152 - DNA, 22 bp, Artificial Sequence
  primer
aacttgcaacactctgtctccc

SEQ ID NO: 120153 - DNA, 39 bp, Artificial Sequence
  primer
gtaaaacgacggccagttggcttataaagtccatggttg

SEQ ID NO: 120154 - DNA, 27 bp, Artificial Sequence
  primer
acttattcttcatgaattaactggtgc

SEQ ID NO: 120155 - DNA, 27 bp, Artificial Sequence
  primer
aaacagtactaaatccagcagatgaaa

SEQ ID NO: 120156 - DNA, 20 bp, Artificial Sequence
  primer
ttgcaaaggcacctcaattc

SEQ ID NO: 120157 - DNA, 40 bp, Artificial Sequence
  primer
gtaaaacgacggccagtaactgcagcaggaaagaactatg

SEQ ID NO: 120158 - DNA, 38 bp, Artificial Sequence
  primer
gtaaaacgacggccagttgtggcagcaataagatccac

SEQ ID NO: 120159 - DNA, 21 bp, Artificial Sequence
  primer
ccactattggtgctttgctga

SEQ ID NO: 120160 - DNA, 38 bp, Artificial Sequence
  primer
gtaaaacgacggccagttttcatcctgcatggtactgg

SEQ ID NO: 120161 - DNA, 39 bp, Artificial Sequence
  primer
gtaaaacgacggccagttcatttctgaatcttgacccac

SEQ ID NO: 120162 - DNA, 37 bp, Artificial Sequence
  primer
gtaaaacgacggccagtaaaggtcaccacaggtgcag

SEQ ID NO: 120163 - DNA, 20 bp, Artificial Sequence
  primer
gagttgggttccagcagttc

SEQ ID NO: 120164 - DNA, 21 bp, Artificial Sequence
  primer
atgcctgttccttcacgattg

SEQ ID NO: 120165 - DNA, 21 bp, Artificial Sequence
  primer
attcgtcgcctccattacttc

SEQ ID NO: 120166 - DNA, 38 bp, Artificial Sequence
  primer
gtaaaacgacggccagttcaggcaattatcctcaagcc

SEQ ID NO: 120167 - DNA, 21 bp, Artificial Sequence
  primer
cgtaagccctgcaataccttc

SEQ ID NO: 120168 - DNA, 22 bp, Artificial Sequence
  primer
gatgtttcactggtttccaagc

SEQ ID NO: 120169 - DNA, 27 bp, Artificial Sequence
  primer
aagttcaattactgctgtcatgtattc

SEQ ID NO: 120170 - DNA, 38 bp, Artificial Sequence; identical to SEQ ID NO: 120166
  primer

SEQ ID NO: 120171 - DNA, 21 bp, Artificial Sequence
  primer
ctctgtggtgtaggaactggg

SEQ ID NO: 120172 - DNA, 41 bp, Artificial Sequence
  primer
gtaaaacgacggccagtcccacctacttccaaatctaagaa

SEQ ID NO: 120173 - DNA, 21 bp, Artificial Sequence
  primer
tcacttaccttggagctgctg

SEQ ID NO: 120174 - DNA, 38 bp, Artificial Sequence
  primer
gtaaaacgacggccagtcaaagtcctgacaacactggg

SEQ ID NO: 120175 - DNA, 38 bp, Artificial Sequence
  primer
gtaaaacgacggccagttgcactgataactcgaggagg

SEQ ID NO: 120176 - DNA, 38 bp, Artificial Sequence
  primer
gtaaaacgacggccagttttcttgatgacttcccttgc

SEQ ID NO: 120177 - DNA, 38 bp, Artificial Sequence
  primer
gtaaaacgacggccagtctggaatttgcctagagaccc

SEQ ID NO: 120178 - DNA, 37 bp, Artificial Sequence
  primer
gtaaaacgacggccagtcctacggccacactgaactc

SEQ ID NO: 120179 - DNA, 38 bp, Artificial Sequence
  primer
gtaaaacgacggccagtttgagggaggaagaagtctgg

SEQ ID NO: 120180 - DNA, 21 bp, Artificial Sequence
  primer
ctggctctcaggacacacttc

SEQ ID NO: 120181 - DNA, 38 bp, Artificial Sequence
  primer
gtaaaacgacggccagtgggagttagggagagtagccc

SEQ ID NO: 120182 - DNA, 21 bp, Artificial Sequence
  primer
gaagggatacctgcaacaacc

SEQ ID NO: 120183 - DNA, 21 bp, Artificial Sequence
  primer
ctaaggactcagccctgttgc

SEQ ID NO: 120184 - DNA, 21 bp, Artificial Sequence
  primer
cagcttctctccacagcacag

SEQ ID NO: 120185 - DNA, 39 bp, Artificial Sequence
  primer
gtaaaacgacggccagtccctgagcatagtaggtgcttg

SEQ ID NO: 120186 - DNA, 21 bp, Artificial Sequence
  primer
gttccctcctctgtgaagcag

SEQ ID NO: 120187 - DNA, 22 bp, Artificial Sequence
  primer
tggtgcatgtatacctgtgtgc

SEQ ID NO: 120188 - DNA, 21 bp, Artificial Sequence
  primer
ttaacacatccatgagccctg

SEQ ID NO: 120189 - DNA, 38 bp, Artificial Sequence
  primer
gtaaaacgacggccagttcccacagatagatggtgctg

SEQ ID NO: 120190 - DNA, 20 bp, Artificial Sequence
  primer
caggtctccatgaaagcgag

SEQ ID NO: 120191 - DNA, 38 bp, Artificial Sequence
  primer
gtaaaacgacggccagttgaagactcatgctgacctgg

SEQ ID NO: 120192 - DNA, 20 bp, Artificial Sequence
  primer
agtagctgggtgtggtggtg

SEQ ID NO: 120193 - DNA, 21 bp, Artificial Sequence
  primer
aaagaggcctgcaaagtgaag

SEQ ID NO: 120194 - DNA, 21 bp, Artificial Sequence
  primer
aggagacaaagtctggttgcc

SEQ ID NO: 120195 - DNA, 38 bp, Artificial Sequence
  primer
gtaaaacgacggccagtcaggtgtgctactgaagtcgg

SEQ ID NO: 120196 - DNA, 38 bp, Artificial Sequence
  primer
gtaaaacgacggccagtcagcacagctttgtcttccac

SEQ ID NO: 120197 - DNA, 37 bp, Artificial Sequence
  primer
gtaaaacgacggccagtcgatagatccgtggaagctg

SEQ ID NO: 120198 - DNA, 38 bp, Artificial Sequence; identical to SEQ ID NO: 120196
  primer

SEQ ID NO: 120199 - DNA, 22 bp, Artificial Sequence
  primer
cccaattctggcatactagctt

SEQ ID NO: 120200 - DNA, 38 bp, Artificial Sequence
  primer
gtaaaacgacggccagttgtcacactctttccaccacg

SEQ ID NO: 120201 - DNA, 22 bp, Artificial Sequence
  primer
gatgcttaatctcacccactcg

SEQ ID NO: 120202 - DNA, 41 bp, Artificial Sequence
  primer
gtaaaacgacggccagttctcatgacctttccattatcaag

SEQ ID NO: 120203 - DNA, 22 bp, Artificial Sequence
  primer
aagcctttcgaatgtctattgc

SEQ ID NO: 120204 - DNA, 22 bp, Artificial Sequence
  primer
gtcttagggtaccaatggatgg

SEQ ID NO: 120205 - DNA, 21 bp, Artificial Sequence
  primer
tgtctcttctaccagcctccc

SEQ ID NO: 120206 - DNA, 38 bp, Artificial Sequence
  primer
gtaaaacgacggccagtatgtatgcgtaggaagcaggg

SEQ ID NO: 120207 - DNA, 21 bp, Artificial Sequence
  primer
aaccacactcaccctcctctg

SEQ ID NO: 120208 - DNA, 21 bp, Artificial Sequence
  primer
atagaagggatgtgcacctgg

SEQ ID NO: 120209 - DNA, 21 bp, Artificial Sequence
  primer
ccaccacaatcagagcatgag

SEQ ID NO: 120210 - DNA, 41 bp, Artificial Sequence
  primer
gtaaaacgacggccagttttctaacttgattcatagcacgc

SEQ ID NO: 120211 - DNA, 21 bp, Artificial Sequence
  primer
ggttctgcagggaattaatgg

SEQ ID NO: 120212 - DNA, 38 bp, Artificial Sequence
  primer
gtaaaacgacggccagtctccaggaagaggcttctgtg

SEQ ID NO: 120213 - DNA, 38 bp, Artificial Sequence
  primer
gtaaaacgacggccagttttgctaagccactgaagctg

SEQ ID NO: 120214 - DNA, 21 bp, Artificial Sequence
  primer
tctgcaatttctgcctcaatg

SEQ ID NO: 120215 - DNA, 22 bp, Artificial Sequence
  primer
gtttcacaatgtccttctcacg

SEQ ID NO: 120216 - DNA, 20 bp, Artificial Sequence
  primer
catcggttaggctggtcttg

SEQ ID NO: 120217 - DNA, 38 bp, Artificial Sequence
  primer
gtaaaacgacggccagtggaaaccaatgtctccaaagc

SEQ ID NO: 120218 - DNA, 21 bp, Artificial Sequence
  primer
gtgccagttctaaccctttgg

SEQ ID NO: 120219 - DNA, 21 bp, Artificial Sequence
  primer
ggtgacaccataaagagcgag

SEQ ID NO: 120220 - DNA, 43 bp, Artificial Sequence
  primer
gtaaaacgacggccagtcacatgacagtcacacataacctttc

SEQ ID NO: 120221 - DNA, 38 bp, Artificial Sequence
  primer
gtaaaacgacggccagtaactgaatagtgggaccctgc

SEQ ID NO: 120222 - DNA, 25 bp, Artificial Sequence
  primer
agtccaacttgagtcctattcaaag

SEQ ID NO: 120223 - DNA, 38 bp, Artificial Sequence; identical to SEQ ID NO: 120217
  primer

SEQ ID NO: 120224 - DNA, 21 bp, Artificial Sequence
  primer
gtgccagttctaaccctttgg

SEQ ID NO: 120225 - DNA, 43 bp, Artificial Sequence
  primer
gtaaaacgacggccagtcttgagtgtataaattctggatttgc

SEQ ID NO: 120226 - DNA, 26 bp, Artificial Sequence
  primer
cacatgacagtcacacataacctttc

SEQ ID NO: 120227 - DNA, 41 bp, Artificial Sequence
  primer
gtaaaacgacggccagttttataagaccgagagagagcgag

SEQ ID NO: 120228 - DNA, 37 bp, Artificial Sequence
  primer
gtaaaacgacggccagtagcagcaccacagacctagc

SEQ ID NO: 120229 - DNA, 36 bp, Artificial Sequence
  primer
gtaaaacgacggccagtggcctagaacccagccttg

SEQ ID NO: 120230 - DNA, 38 bp, Artificial Sequence
  primer
gtaaaacgacggccagtaggcaatatggtttcaatggg

SEQ ID NO: 120231 - DNA, 38 bp, Artificial Sequence
  primer
gtaaaacgacggccagtgttgacccatcatttctgtgc

SEQ ID NO: 120232 - DNA, 36 bp, Artificial Sequence
  primer
gtaaaacgacggccagtcccagtctccatgctctgg

SEQ ID NO: 120233 - DNA, 38 bp, Artificial Sequence
  primer
gtaaaacgacggccagttacttggacccttccatcctg

SEQ ID NO: 120234 - DNA, 38 bp, Artificial Sequence
  primer
gtaaaacgacggccagtagagctggtgaggaaggtgac

SEQ ID NO: 120235 - DNA, 19 bp, Artificial Sequence
  primer
ctccgtgctcacagtctcg

SEQ ID NO: 120236 - DNA, 20 bp, Artificial Sequence
  primer
ggcttctacagcttgagccc

SEQ ID NO: 120237 - DNA, 22 bp, Artificial Sequence
  primer
cagaagaggctgctatgtttgg

SEQ ID NO: 120238 - DNA, 18 bp, Artificial Sequence
  primer
ctgcatggagtgcaccag

SEQ ID NO: 120239 - DNA, 21 bp, Artificial Sequence
  primer
tcagactcaaaggctcttccc

SEQ ID NO: 120240 - DNA, 20 bp, Artificial Sequence
  primer
agatgagcatcttcctcggg

SEQ ID NO: 120241 - DNA, 24 bp, Artificial Sequence
  primer
aaaggttcaaacatgcaattatcc

SEQ ID NO: 120242 - DNA, 45 bp, Artificial Sequence
  primer
gtaaaacgacggccagtaaatctttgaactgttgtgattatatcc

SEQ ID NO: 120243 - DNA, 40 bp, Artificial Sequence
  primer
gtaaaacgacggccagtccaacgaagattcaggatttagg

SEQ ID NO: 120244 - DNA, 30 bp, Artificial Sequence
  primer
gagatgatttaacttaatattcaggagttg

SEQ ID NO: 120245 - DNA, 21 bp, Artificial Sequence
  primer
cttcccttcccaccttaacac

SEQ ID NO: 120246 - DNA, 38 bp, Artificial Sequence
  primer
gtaaaacgacggccagtagtggagaaagttctgggctg

SEQ ID NO: 120247 - DNA, 21 bp, Artificial Sequence
  primer
tctgaggaggatgtgagatgg

SEQ ID NO: 120248 - DNA, 22 bp, Artificial Sequence
  primer
tcatgatagcatgcacttctgg

SEQ ID NO: 120249 - DNA, 38 bp, Artificial Sequence
  primer
gtaaaacgacggccagtgcagacaagggtagatttggg

SEQ ID NO: 120250 - DNA, 38 bp, Artificial Sequence
  primer
gtaaaacgacggccagtctctaaaggccactgtgatgg

SEQ ID NO: 120251 - DNA, 22 bp, Artificial Sequence
  primer
tgatgtgagccagcttgttatg

SEQ ID NO: 120252 - DNA, 38 bp, Artificial Sequence
  primer
gtaaaacgacggccagtttcaacagccaaagtttcacc

SEQ ID NO: 120253 - DNA, 20 bp, Artificial Sequence
  primer
ggcttcacttggagaggtgg

SEQ ID NO: 120254 - DNA, 21 bp, Artificial Sequence
  primer
agactaagacgggtcccacag

SEQ ID NO: 120255 - DNA, 20 bp, Artificial Sequence
  primer
caggcagtggaggctgttag

SEQ ID NO: 120256 - DNA, 38 bp, Artificial Sequence
  primer
gtaaaacgacggccagtgtgactgtccttggttgcttg

SEQ ID NO: 120257 - DNA, 21 bp, Artificial Sequence
  primer
tgaagaccagggtaggaggtg

SEQ ID NO: 120258 - DNA, 21 bp, Artificial Sequence
  primer
cctcccatataacgagcttcc

SEQ ID NO: 120259 - DNA, 38 bp, Artificial Sequence
  primer
gtaaaacgacggccagtaagcaaggaactcacaggagg

SEQ ID NO: 120260 - DNA, 21 bp, Artificial Sequence
  primer
gtcctgctcataggcatgttg

SEQ ID NO: 120261 - DNA, 38 bp, Artificial Sequence
  primer
gtaaaacgacggccagtcccttcaaacaggtttccttg

SEQ ID NO: 120262 - DNA, 38 bp, Artificial Sequence
  primer
gtaaaacgacggccagtgtgaaggtactcacagcgacg

SEQ ID NO: 120263 - DNA, 20 bp, Artificial Sequence
  primer
catggactccagtggtcagc

SEQ ID NO: 120264 - DNA, 22 bp, Artificial Sequence
  primer
gaagaaggcctccattctacag

SEQ ID NO: 120265 - DNA, 39 bp, Artificial Sequence
  primer
gtaaaacgacggccagtgctgctatctctaagccacagg

SEQ ID NO: 120266 - DNA, 38 bp, Artificial Sequence
  primer
gtaaaacgacggccagttttaatttggatgctgggagc

SEQ ID NO: 120267 - DNA, 20 bp, Artificial Sequence
  primer
acaatccaagtggatgctgg

SEQ ID NO: 120268 - DNA, 37 bp, Artificial Sequence
  primer
gtaaaacgacggccagttgagcaagtcagtgggtgac

SEQ ID NO: 120269 - DNA, 38 bp, Artificial Sequence
  primer
gtaaaacgacggccagtcatgtctaggcccgaacaaag

SEQ ID NO: 120270 - DNA, 37 bp, Artificial Sequence
  primer
gtaaaacgacggccagttgcatgtcaggacattctgg

SEQ ID NO: 120271 - DNA, 22 bp, Artificial Sequence
  primer
cctgagtctaaccaaggctctg

SEQ ID NO: 120272 - DNA, 40 bp, Artificial Sequence
  primer
gtaaaacgacggccagttcagatgacagggctcaattatg

SEQ ID NO: 120273 - DNA, 21 bp, Artificial Sequence
  primer
cagaatttgggtttcctgacc

SEQ ID NO: 120274 - DNA, 21 bp, Artificial Sequence
  primer
aacgtttcccagtgcattacc

SEQ ID NO: 120275 - DNA, 38 bp, Artificial Sequence
  primer
gtaaaacgacggccagtatccatctctacccacttgcc

SEQ ID NO: 120276 - DNA, 39 bp, Artificial Sequence
  primer
gtaaaacgacggccagtgaacaaaccacagactgaagcc

SEQ ID NO: 120277 - DNA, 38 bp, Artificial Sequence
  primer
gtaaaacgacggccagtggccaggagctaaagtctgtg

SEQ ID NO: 120278 - DNA, 37 bp, Artificial Sequence
  primer
gtaaaacgacggccagtacgctcggaagagacatcag

SEQ ID NO: 120279 - DNA, 22 bp, Artificial Sequence
  primer
tccctccgtatttgtgagtttg

SEQ ID NO: 120280 - DNA, 21 bp, Artificial Sequence
  primer
ggcatcttgggatttcttcac

SEQ ID NO: 120281 - DNA, 21 bp, Artificial Sequence
  primer
aaggaacaaagctgctccaag

SEQ ID NO: 120282 - DNA, 21 bp, Artificial Sequence
  primer
cttccctgaggagctcacaac

SEQ ID NO: 120283 - DNA, 21 bp, Artificial Sequence
  primer
gtacaatgctgcatggcctac

SEQ ID NO: 120284 - DNA, 39 bp, Artificial Sequence
  primer
gtaaaacgacggccagtttaggctgatagttctgttgcg

SEQ ID NO: 120285 - DNA, 21 bp, Artificial Sequence
  primer
tgtgtctgaacacacgcacac

SEQ ID NO: 120286 - DNA, 21 bp, Artificial Sequence
  primer
ctcctccaagtcagcaagatg

SEQ ID NO: 120287 - DNA, 21 bp, Artificial Sequence
  primer
ttaccaaaggacggttccaag

SEQ ID NO: 120288 - DNA, 21 bp, Artificial Sequence
  primer
cttccctgaggagctcacaac

SEQ ID NO: 120289 - DNA, 21 bp, Artificial Sequence
  primer
atccctcaagatgtcctctgc

SEQ ID NO: 120290 - DNA, 38 bp, Artificial Sequence
  primer
gtaaaacgacggccagtgcctaactggagatccttccc

SEQ ID NO: 120291 - DNA, 38 bp, Artificial Sequence
  primer
gtaaaacgacggccagtctggtgtttcccagtctgtcc

SEQ ID NO: 120292 - DNA, 39 bp, Artificial Sequence
  primer
gtaaaacgacggccagtggtggtgagaaccaagacagac

SEQ ID NO: 120293 - DNA, 21 bp, Artificial Sequence
  primer
ctagtgcttggcacactgctc

SEQ ID NO: 120294 - DNA, 38 bp, Artificial Sequence
  primer
gtaaaacgacggccagtgcgatattgcctgtatctccc

SEQ ID NO: 120295 - DNA, 21 bp, Artificial Sequence
  primer
aagaagccaaccaacagcttg

SEQ ID NO: 120296 - DNA, 37 bp, Artificial Sequence
  primer
gtaaaacgacggccagtgctggatttgtgctctctgc

SEQ ID NO: 120297 - DNA, 20 bp, Artificial Sequence
  primer
ctgcctagaggcaactctgc

SEQ ID NO: 120298 - DNA, 21 bp, Artificial Sequence
  primer
gcagacaaagaccaagcacag

SEQ ID NO: 120299 - DNA, 21 bp, Artificial Sequence
  primer
gctccaccagcttcctaactg

SEQ ID NO: 120300 - DNA, 21 bp, Artificial Sequence
  primer
ttctccaagacaatctgtcgg

SEQ ID NO: 120301 - DNA, 20 bp, Artificial Sequence
  primer
ctgggctcaagtgatcctcc

SEQ ID NO: 120302 - DNA, 38 bp, Artificial Sequence
  primer
gtaaaacgacggccagttcagttctgcagaccaagctg

SEQ ID NO: 120303 - DNA, 20 bp, Artificial Sequence
  primer
ggctggatcttctccctcag

SEQ ID NO: 120304 - DNA, 38 bp, Artificial Sequence
  primer
gtaaaacgacggccagtaacgacagtactgggaaaggc

SEQ ID NO: 120305 - DNA, 22 bp, Artificial Sequence
  primer
gcccagatgatcagctacaaac

SEQ ID NO: 120306 - DNA, 20 bp, Artificial Sequence
  primer
agatgccaagaatgcacctg

SEQ ID NO: 120307 - DNA, 21 bp, Artificial Sequence
  primer
caatatacactgcagccaccc

SEQ ID NO: 120308 - DNA, 23 bp, Artificial Sequence
  primer
gacaaggcaccagaatgtaagtg

SEQ ID NO: 120309 - DNA, 19 bp, Artificial Sequence
  primer
agtctcccaggacaccacg

SEQ ID NO: 120310 - DNA, 38 bp, Artificial Sequence
  primer
gtaaaacgacggccagtcatgttcacgtagcacaccac

SEQ ID NO: 120311 - DNA, 21 bp, Artificial Sequence
  primer
catcctatggcaagaagaggg

SEQ ID NO: 120312 - DNA, 18 bp, Artificial Sequence
  primer
atggtgtgaacccgggag

SEQ ID NO: 120313 - DNA, 38 bp, Artificial Sequence
  primer
gtaaaacgacggccagttgcactgtggatgatgttctg

SEQ ID NO: 120314 - DNA, 19 bp, Artificial Sequence
  primer
gacggtcagcacttagccc

SEQ ID NO: 120315 - DNA, 20 bp, Artificial Sequence
  primer
gcacaggcagttcaagaagg

SEQ ID NO: 120316 - DNA, 21 bp, Artificial Sequence
  primer
gggcaaggagtcacagctaag

SEQ ID NO: 120317 - DNA, 38 bp, Artificial Sequence
  primer
gtaaaacgacggccagtcagggagaaagtgcatacagc

SEQ ID NO: 120318 - DNA, 38 bp, Artificial Sequence
  primer
gtaaaacgacggccagttcagggcctaagctctgtacc

SEQ ID NO: 120319 - DNA, 20 bp, Artificial Sequence
  primer
ctgagcacatctgacctggg

SEQ ID NO: 120320 - DNA, 21 bp, Artificial Sequence
  primer
cttatctgcgtggagaaaggg

SEQ ID NO: 120321 - DNA, 20 bp, Artificial Sequence
  primer
gactgcaggaagaaggctgg

SEQ ID NO: 120322 - DNA, 21 bp, Artificial Sequence
  primer
aaggccaactcatagaggtcc

SEQ ID NO: 120323 - DNA, 23 bp, Artificial Sequence
  primer
catctgtccacaggtagaactgg

SEQ ID NO: 120324 - DNA, 21 bp, Artificial Sequence
  primer
ctgcactcctctacccactgc

SEQ ID NO: 120325 - DNA, 23 bp, Artificial Sequence
  primer
aatccctcagtgatgtttctgtg

SEQ ID NO: 120326 - DNA, 21 bp, Artificial Sequence
  primer
gtggtttgtaatgggcaaatg

SEQ ID NO: 120327 - DNA, 23 bp, Artificial Sequence
  primer
aaaggaagtacaaagttgctgcc

SEQ ID NO: 120328 - DNA, 38 bp, Artificial Sequence
  primer
gtaaaacgacggccagtttaccaaccagttaggtgccc

SEQ ID NO: 120329 - DNA, 41 bp, Artificial Sequence
  primer
gtaaaacgacggccagtgctgaaatacaaggaaggtagcag

SEQ ID NO: 120330 - DNA, 38 bp, Artificial Sequence
  primer
gtaaaacgacggccagttgaacggtgccactttacatc

SEQ ID NO: 120331 - DNA, 37 bp, Artificial Sequence
  primer
gtaaaacgacggccagtaggttccgtcatggctgtag

SEQ ID NO: 120332 - DNA, 23 bp, Artificial Sequence
  primer
ggacaagtagagtttcacccttg

SEQ ID NO: 120333 - DNA, 37 bp, Artificial Sequence
  primer
gtaaaacgacggccagttgagctcaggcaatccactc

SEQ ID NO: 120334 - DNA, 39 bp, Artificial Sequence
  primer
gtaaaacgacggccagtaaaggcatgcatacaatcactg

SEQ ID NO: 120335 - DNA, 43 bp, Artificial Sequence
  primer
gtaaaacgacggccagtaaatacatctgtcactgtgagtcctg

SEQ ID NO: 120336 - DNA, 24 bp, Artificial Sequence
  primer
ctcaggacaggacaaattattcaa

SEQ ID NO: 120337 - DNA, 21 bp, Artificial Sequence
  primer
gatctccacaaacccttcagc

SEQ ID NO: 120338 - DNA, 22 bp, Artificial Sequence
  primer
gggcaaagaaaccatataagcc

SEQ ID NO: 120339 - DNA, 42 bp, Artificial Sequence
  primer
gtaaaacgacggccagtccaacacattagcaaatacttccag

SEQ ID NO: 120340 - DNA, 23 bp, Artificial Sequence
  primer
gggcccttatctccattgtatag

SEQ ID NO: 120341 - DNA, 26 bp, Artificial Sequence
  primer
aaactgaagtatggaatactcttggg

SEQ ID NO: 120342 - DNA, 22 bp, Artificial Sequence
  primer
gggatctttggaaggataaggt

SEQ ID NO: 120343 - DNA, 21 bp, Artificial Sequence
  primer
tctttgacaggttcctcctgg

SEQ ID NO: 120344 - DNA, 21 bp, Artificial Sequence
  primer
aggcgtgtcaatgttcctacc

SEQ ID NO: 120345 - DNA, 39 bp, Artificial Sequence
  primer
gtaaaacgacggccagtcaatgggttctggttctcaaag

SEQ ID NO: 120346 - DNA, 37 bp, Artificial Sequence
  primer
gtaaaacgacggccagtttggcttccttgtcctgttc

SEQ ID NO: 120347 - DNA, 21 bp, Artificial Sequence
  primer
ggcagttggtatcagcatcag

SEQ ID NO: 120348 - DNA, 21 bp, Artificial Sequence
  primer
attgcaactgacaatcccacc

SEQ ID NO: 120349 - DNA, 21 bp, Artificial Sequence
  primer
atggagagggctctgttcctc

SEQ ID NO: 120350 - DNA, 21 bp, Artificial Sequence
  primer
agtttctctgcccgactgaag

SEQ ID NO: 120351 - DNA, 19 bp, Artificial Sequence
  primer
caaactcctggcctcaagc

SEQ ID NO: 120352 - DNA, 19 bp, Artificial Sequence
  primer
aaagtgtcacccagagggc

SEQ ID NO: 120353 - DNA, 38 bp, Artificial Sequence
  primer
gtaaaacgacggccagtctacagccactgcaagacctg

SEQ ID NO: 120354 - DNA, 37 bp, Artificial Sequence
  primer
gtaaaacgacggccagtaagtgatctgcccgccttag

SEQ ID NO: 120355 - DNA, 38 bp, Artificial Sequence
  primer
gtaaaacgacggccagtaaattccatgccctttccttc

SEQ ID NO: 120356 - DNA, 38 bp, Artificial Sequence
  primer
gtaaaacgacggccagtagagtaggcagaggctgatgg

SEQ ID NO: 120357 - DNA, 38 bp, Artificial Sequence
  primer
gtaaaacgacggccagtaatggttggagggagggatag

SEQ ID NO: 120358 - DNA, 21 bp, Artificial Sequence
  primer
accatacttggctgccttagc

SEQ ID NO: 120359 - DNA, 38 bp, Artificial Sequence
  primer
gtaaaacgacggccagttatttgggaaggaacaaaggc

SEQ ID NO: 120360 - DNA, 21 bp, Artificial Sequence
  primer
tgagacgtggtcaagggtatg

SEQ ID NO: 120361 - DNA, 38 bp, Artificial Sequence
  primer
gtaaaacgacggccagtaagtcacttcccttctctggg

SEQ ID NO: 120362 - DNA, 38 bp, Artificial Sequence
  primer
gtaaaacgacggccagtttcaagcccgatctacagtcc

SEQ ID NO: 120363 - DNA, 21 bp, Artificial Sequence
  primer
tgaccaacagtcctaacaggg

SEQ ID NO: 120364 - DNA, 38 bp, Artificial Sequence
  primer
gtaaaacgacggccagtgtggaaaggaacaggaagctg

SEQ ID NO: 120365 - DNA, 36 bp, Artificial Sequence
  primer
gtaaaacgacggccagtgattagagatggaggcggg

SEQ ID NO: 120366 - DNA, 38 bp, Artificial Sequence
  primer
gtaaaacgacggccagtaactccaagtccaggaacacc

SEQ ID NO: 120367 - DNA, 21 bp, Artificial Sequence
  primer
ggcagatactctgcaattggg

SEQ ID NO: 120368 - DNA, 18 bp, Artificial Sequence
  primer
gttgatctgcccacctcg

SEQ ID NO: 120369 - DNA, 20 bp, Artificial Sequence
  primer
acccagtgctcaccaaactg

SEQ ID NO: 120370 - DNA, 21 bp, Artificial Sequence
  primer
ctacagtgcctggtcagaagc

SEQ ID NO: 120371 - DNA, 22 bp, Artificial Sequence
  primer
tgggaacgaaagtctctgtctc

SEQ ID NO: 120372 - DNA, 38 bp, Artificial Sequence
  primer
gtaaaacgacggccagtgaagaggccctgatatccctg

SEQ ID NO: 120373 - DNA, 21 bp, Artificial Sequence
  primer
accttatagcttgcccgtttg

SEQ ID NO: 120374 - DNA, 38 bp, Artificial Sequence
  primer
gtaaaacgacggccagtgaggctctacattcagctcgg

SEQ ID NO: 120375 - DNA, 21 bp, Artificial Sequence
  primer
ctcttgtttccttgccctgtg

SEQ ID NO: 120376 - DNA, 21 bp, Artificial Sequence
  primer
ggttcgaagggtcttcatttg

SEQ ID NO: 120377 - DNA, 21 bp, Artificial Sequence
  primer
aaggagaaatgccatgctctg

SEQ ID NO: 120378 - DNA, 38 bp, Artificial Sequence
  primer
gtaaaacgacggccagtttgggatagccttaggacctc

SEQ ID NO: 120379 - DNA, 22 bp, Artificial Sequence
  primer
tcacctgagagaagagtgaggg

SEQ ID NO: 120380 - DNA, 37 bp, Artificial Sequence
  primer
gtaaaacgacggccagtgaaagagcccattcctcctg

SEQ ID NO: 120381 - DNA, 22 bp, Artificial Sequence
  primer
ggtcaaaggtgagacagactgg

SEQ ID NO: 120382 - DNA, 21 bp, Artificial Sequence
  primer
gtaggtggagagggcactgac

SEQ ID NO: 120383 - DNA, 38 bp, Artificial Sequence
  primer
gtaaaacgacggccagtgggatcttctggacattctgg

SEQ ID NO: 120384 - DNA, 39 bp, Artificial Sequence
  primer
gtaaaacgacggccagtccaggctagatgtggttgtttc

SEQ ID NO: 120385 - DNA, 38 bp, Artificial Sequence
  primer
gtaaaacgacggccagttagcctcagccctctatctgg

SEQ ID NO: 120386 - DNA, 22 bp, Artificial Sequence
  primer
tgcatgcgatgcttaatacaag

SEQ ID NO: 120387 - DNA, 21 bp, Artificial Sequence
  primer
gctaatagcatgcacaaaggg

SEQ ID NO: 120388 - DNA, 42 bp, Artificial Sequence
  primer
gtaaaacgacggccagtcatgtaaccttcaattcagtctttg

SEQ ID NO: 120389 - DNA, 21 bp, Artificial Sequence
  primer
tgtgaagccagtacaagggag

SEQ ID NO: 120390 - DNA, 39 bp, Artificial Sequence
  primer
gtaaaacgacggccagtgagtgttacaaggcaacttggg

SEQ ID NO: 120391 - DNA, 21 bp, Artificial Sequence
  primer
ccaagggtaggaaagagaccc

SEQ ID NO: 120392 - DNA, 38 bp, Artificial Sequence
  primer
gtaaaacgacggccagtaaactaagcccagcctcttgg

SEQ ID NO: 120393 - DNA, 38 bp, Artificial Sequence
  primer
gtaaaacgacggccagttcggatcagattaaccagtgc

SEQ ID NO: 120394 - DNA, 45 bp, Artificial Sequence
  primer
gtaaaacgacggccagttttagagtagctaacagttatgtctggg

SEQ ID NO: 120395 - DNA, 20 bp, Artificial Sequence
  primer
aggagtttgaggctgcagtg

SEQ ID NO: 120396 - DNA, 40 bp, Artificial Sequence
  primer
gtaaaacgacggccagttcaaagtcctaggttctcattgc

SEQ ID NO: 120397 - DNA, 40 bp, Artificial Sequence
  primer
gtaaaacgacggccagtcataactgcgatatagctggagg

SEQ ID NO: 120398 - DNA, 23 bp, Artificial Sequence
  primer
caagctctcctttgcttctgttt

SEQ ID NO: 120399 - DNA, 40 bp, Artificial Sequence
  primer
gtaaaacgacggccagtcagagacttctccaaattccttg

SEQ ID NO: 120400 - DNA, 38 bp, Artificial Sequence
  primer
gtaaaacgacggccagttgcttgcccagttgtctctac

SEQ ID NO: 120401 - DNA, 37 bp, Artificial Sequence
  primer
gtaaaacgacggccagtctgggcagtgaggttatggg

SEQ ID NO: 120402 - DNA, 22 bp, Artificial Sequence
  primer
aacacaaagctgaaagcctgac

SEQ ID NO: 120403 - DNA, 40 bp, Artificial Sequence
  primer
gtaaaacgacggccagttccctaatctacccacttcaagg

SEQ ID NO: 120404 - DNA, 21 bp, Artificial Sequence
  primer
gtcttccagtgagctgtgagc

SEQ ID NO: 120405 - DNA, 20 bp, Artificial Sequence
  primer
agctgttaacgagcattggg

SEQ ID NO: 120406 - DNA, 38 bp, Artificial Sequence
  primer
gtaaaacgacggccagttaccgacattaaggcactccg

SEQ ID NO: 120407 - DNA, 21 bp, Artificial Sequence
  primer
tggcagtgaaggctttctttc

SEQ ID NO: 120408 - DNA, 20 bp, Artificial Sequence
  primer
aaaggaaagagggagcgaac

SEQ ID NO: 120409 - DNA, 38 bp, Artificial Sequence
  primer
gtaaaacgacggccagttgagagtgacactggtcatgc

SEQ ID NO: 120410 - DNA, 20 bp, Artificial Sequence
  primer
ggagatggaggtgcactcag

SEQ ID NO: 120411 - DNA, 21 bp, Artificial Sequence
  primer
aacctgtgcacttcctcttcg

SEQ ID NO: 120412 - DNA, 41 bp, Artificial Sequence
  primer
gtaaaacgacggccagtttccttaaattgcaaagtttaccc

SEQ ID NO: 120413 - DNA, 38 bp, Artificial Sequence
  primer
gtaaaacgacggccagtcactttctccaccacaacaca

SEQ ID NO: 120414 - DNA, 42 bp, Artificial Sequence
  primer
gtaaaacgacggccagtctacagcagtttattggtttcactg

SEQ ID NO: 120415 - DNA, 21 bp, Artificial Sequence
  primer
gtagaaggctgtgcccagaag

SEQ ID NO: 120416 - DNA, 42 bp, Artificial Sequence
  primer
gtaaaacgacggccagtagaaccatgatggcatatcatgtag

SEQ ID NO: 120417 - DNA, 39 bp, Artificial Sequence
  primer
gtaaaacgacggccagtaagcttcgggctctcaaatatc

SEQ ID NO: 120418 - DNA, 20 bp, Artificial Sequence
  primer
ggactgggtagcggattctc

SEQ ID NO: 120419 - DNA, 20 bp, Artificial Sequence
  primer
aatgaatgacaaggcaaggc

SEQ ID NO: 120420 - DNA, 21 bp, Artificial Sequence
  primer
gtcacatggagcagggacttc

SEQ ID NO: 120421 - DNA, 21 bp, Artificial Sequence
  primer
tttgcccggccttatatattc

SEQ ID NO: 120422 - DNA, 21 bp, Artificial Sequence
  primer
gcacttagaacagcatttggg

SEQ ID NO: 120423 - DNA, 38 bp, Artificial Sequence
  primer
gtaaaacgacggccagtaattctccctccctcaaatgg

SEQ ID NO: 120424 - DNA, 37 bp, Artificial Sequence
  primer
gtaaaacgacggccagttaagaatgtggatgcagggc

SEQ ID NO: 120425 - DNA, 38 bp, Artificial Sequence
  primer
gtaaaacgacggccagtgtggtcagaaggaagaaaggc

SEQ ID NO: 120426 - DNA, 37 bp, Artificial Sequence
  primer
gtaaaacgacggccagtaagcaacaagaccagatggg

SEQ ID NO: 120427 - DNA, 21 bp, Artificial Sequence
  primer
tgctatgatttccatccctcc

SEQ ID NO: 120428 - DNA, 38 bp, Artificial Sequence
  primer
gtaaaacgacggccagttggcaaagtctttcgtgtttc

SEQ ID NO: 120429 - DNA, 38 bp, Artificial Sequence
  primer
gtaaaacgacggccagtatttggctttcacggtttgac

SEQ ID NO: 120430 - DNA, 38 bp, Artificial Sequence
  primer
gtaaaacgacggccagtgctcctctgcctcttcctctt

SEQ ID NO: 120431 - DNA, 38 bp, Artificial Sequence
  primer
gtaaaacgacggccagttgtttgagcacaagtccttcg

SEQ ID NO: 120432 - DNA, 21 bp, Artificial Sequence
  primer
aaggcagtttccagtctctgc

SEQ ID NO: 120433 - DNA, 21 bp, Artificial Sequence
  primer
ctcctcctccgaaggtttagg

SEQ ID NO: 120434 - DNA, 26 bp, Artificial Sequence
  primer
tgcctaatttatttcaagttcagctc

SEQ ID NO: 120435 - DNA, 22 bp, Artificial Sequence
  primer
aaatgtatggttccgttaatgc

SEQ ID NO: 120436 - DNA, 22 bp, Artificial Sequence
  primer
aggcataccacaagagattctg

SEQ ID NO: 120437 - DNA, 29 bp, Artificial Sequence
  primer
tatttacccttagatgtgtattctttcaa

SEQ ID NO: 120438 - DNA, 21 bp, Artificial Sequence
  primer
tcaaactaaggctgcttgtgc

SEQ ID NO: 120439 - DNA, 35 bp, Artificial Sequence
  primer
gtaaaacgacggccagtatggccagaaagcacctg

SEQ ID NO: 120440 - DNA, 22 bp, Artificial Sequence
  primer
ggattgaataggatgcttccag

SEQ ID NO: 120441 - DNA, 38 bp, Artificial Sequence
  primer
gtaaaacgacggccagtttcaaagccatggaaatatgc

SEQ ID NO: 120442 - DNA, 39 bp, Artificial Sequence
  primer
gtaaaacgacggccagtcttggctgaaactgttgcatag

SEQ ID NO: 120443 - DNA, 24 bp, Artificial Sequence
  primer
ctatcatcccttaacattcccttc

SEQ ID NO: 120444 - DNA, 38 bp, Artificial Sequence
  primer
gtaaaacgacggccagtagaagtccaggtgcttcttgc

SEQ ID NO: 120445 - DNA, 38 bp, Artificial Sequence
  primer
gtaaaacgacggccagtgctaagccatctcctgcctac

SEQ ID NO: 120446 - DNA, 20 bp, Artificial Sequence
  primer
cgcacgcatacgtattaccg

SEQ ID NO: 120447 - DNA, 21 bp, Artificial Sequence
  primer
ctctgagcagacacttggctc

SEQ ID NO: 120448 - DNA, 38 bp, Artificial Sequence
  primer
gtaaaacgacggccagtttcaggaggtgtttgttgagc

SEQ ID NO: 120449 - DNA, 21 bp, Artificial Sequence
  primer
caccagttgtgcacctgtctc

SEQ ID NO: 120450 - DNA, 27 bp, Artificial Sequence
  primer
actagttgcatgttacttctacttccc

SEQ ID NO: 120451 - DNA, 39 bp, Artificial Sequence
  primer
gtaaaacgacggccagtaattgtaaatgttgcgggtcag

SEQ ID NO: 120452 - DNA, 21 bp, Artificial Sequence
  primer
actgtgctcaggtccagacaa

SEQ ID NO: 120453 - DNA, 26 bp, Artificial Sequence
  primer
gctaaattcatgtgctaagtcactcc

SEQ ID NO: 120454 - DNA, 21 bp, Artificial Sequence
  primer
agcgagagaatggcatgaatc

SEQ ID NO: 120455 - DNA, 18 bp, Artificial Sequence
  primer
attgcttgaatccgggtg

SEQ ID NO: 120456 - DNA, 40 bp, Artificial Sequence
  primer
gtaaaacgacggccagttgaactgccaggagtatgaaatc

SEQ ID NO: 120457 - DNA, 22 bp, Artificial Sequence
  primer
caacagactccaatgaccacag

SEQ ID NO: 120458 - DNA, 38 bp, Artificial Sequence
  primer
gtaaaacgacggccagtaaatgcaccagatgtgaaaca

SEQ ID NO: 120459 - DNA, 39 bp, Artificial Sequence
  primer
gtaaaacgacggccagtgaaagcttgaggttcacgtagc

SEQ ID NO: 120460 - DNA, 38 bp, Artificial Sequence
  primer
gtaaaacgacggccagtctgctgatcacccagagtcag

SEQ ID NO: 120461 - DNA, 22 bp, Artificial Sequence
  primer
ggtgggatctctctattgcatc

SEQ ID NO: 120462 - DNA, 20 bp, Artificial Sequence
  primer
aggagaatggcgtttgaacc

SEQ ID NO: 120463 - DNA, 23 bp, Artificial Sequence
  primer
atccatctaagacatgggaaatg

SEQ ID NO: 120464 - DNA, 44 bp, Artificial Sequence
  primer
gtaaaacgacggccagtaaacccaaagcattagaatacaataac

SEQ ID NO: 120465 - DNA, 23 bp, Artificial Sequence
  primer
gtgtggtcaagactctcaacacc

SEQ ID NO: 120466 - DNA, 21 bp, Artificial Sequence
  primer
gtttggctgcttcagtaacgc

SEQ ID NO: 120467 - DNA, 21 bp, Artificial Sequence
  primer
ttaggttgatcacaggccatc

SEQ ID NO: 120468 - DNA, 41 bp, Artificial Sequence
  primer
gtaaaacgacggccagtggtactgattaaactgggtccttc

SEQ ID NO: 120469 - DNA, 41 bp, Artificial Sequence
  primer
gtaaaacgacggccagtgccactgtctatctcatcaattcc

SEQ ID NO: 120470 - DNA, 38 bp, Artificial Sequence
  primer
gtaaaacgacggccagtattcatgattctgaacgctgg

SEQ ID NO: 120471 - DNA, 22 bp, Artificial Sequence
  primer
aaggtaatgctaggcacagtgg

SEQ ID NO: 120472 - DNA, 38 bp, Artificial Sequence
  primer
gtaaaacgacggccagtgcatgcctgtatgtgttagcg

SEQ ID NO: 120473 - DNA, 38 bp, Artificial Sequence
  primer
gtaaaacgacggccagtgtggattgttgatgaacgctg

SEQ ID NO: 120474 - DNA, 23 bp, Artificial Sequence
  primer
tcactcctgtccactaagcagtc

SEQ ID NO: 120475 - DNA, 38 bp, Artificial Sequence
  primer
gtaaaacgacggccagtgcttaaagcatttcccagcac

SEQ ID NO: 120476 - DNA, 21 bp, Artificial Sequence
  primer
agccaatggccctagtgtttc

SEQ ID NO: 120477 - DNA, 21 bp, Artificial Sequence
  primer
tctcttcaaggtcttccggtg

SEQ ID NO: 120478 - DNA, 37 bp, Artificial Sequence; identical to SEQ ID NO: 97463
  primer

SEQ ID NO: 120479 - DNA, 21 bp, Artificial Sequence
  primer
tgcctcaatttaccgtgtctc

SEQ ID NO: 120480 - DNA, 21 bp, Artificial Sequence
  primer
cagaatgccttacaagcaacc

SEQ ID NO: 120481 - DNA, 24 bp, Artificial Sequence
  primer
cctccaaggttgatttattaaagg

SEQ ID NO: 120482 - DNA, 22 bp, Artificial Sequence
  primer
ttgctgtgttagctgctttagg

SEQ ID NO: 120483 - DNA, 38 bp, Artificial Sequence
  primer
gtaaaacgacggccagtgcttcctgttgtgctgatttg

SEQ ID NO: 120484 - DNA, 25 bp, Artificial Sequence
  primer
tgtaattcttgttccacagaactgg

SEQ ID NO: 120485 - DNA, 21 bp, Artificial Sequence
  primer
tgggagcttctttcttcttgg

SEQ ID NO: 120486 - DNA, 20 bp, Artificial Sequence
  primer
gtggcgagcaatctttcttc

SEQ ID NO: 120487 - DNA, 22 bp, Artificial Sequence
  primer
aaaggctcattgtttggttcag

SEQ ID NO: 120488 - DNA, 42 bp, Artificial Sequence
  primer
gtaaaacgacggccagtgcataccacagatgtgtcttaaagg

SEQ ID NO: 120489 - DNA, 18 bp, Artificial Sequence
  primer
agccttggtgacagaccg

SEQ ID NO: 120490 - DNA, 38 bp, Artificial Sequence
  primer
gtaaaacgacggccagttgcctggactgaaacaatcac

SEQ ID NO: 120491 - DNA, 21 bp, Artificial Sequence
  primer
caaacgtagctaatgggaggc

SEQ ID NO: 120492 - DNA, 38 bp, Artificial Sequence
  primer
gtaaaacgacggccagtgaacagggattaccacttcgc

SEQ ID NO: 120493 - DNA, 38 bp, Artificial Sequence
  primer
gtaaaacgacggccagttgcagaggaaagaatgctcag

SEQ ID NO: 120494 - DNA, 20 bp, Artificial Sequence
  primer
caggaaggaagtggacttgg

SEQ ID NO: 120495 - DNA, 41 bp, Artificial Sequence
  primer
gtaaaacgacggccagtaatgacaactctgtttgtcactgc

SEQ ID NO: 120496 - DNA, 24 bp, Artificial Sequence
  primer
tgcaatgtatcaaatcataatcca

SEQ ID NO: 120497 - DNA, 20 bp, Artificial Sequence
  primer
gaaagccactttccaccacc

SEQ ID NO: 120498 - DNA, 19 bp, Artificial Sequence
  primer
gctatgtgccctctggtgg

SEQ ID NO: 120499 - DNA, 22 bp, Artificial Sequence
  primer
ctgtgtgtcctttgaagaccag

SEQ ID NO: 120500 - DNA, 21 bp, Artificial Sequence
  primer
cacgcactccaagtcaacatc

SEQ ID NO: 120501 - DNA, 22 bp, Artificial Sequence
  primer
ccaaagaatatcaacaaagcgg

SEQ ID NO: 120502 - DNA, 24 bp, Artificial Sequence
  primer
gaacaggcaaatctataaaggagg

SEQ ID NO: 120503 - DNA, 21 bp, Artificial Sequence
  primer
ttccttggcagttgtatgctg

SEQ ID NO: 120504 - DNA, 20 bp, Artificial Sequence
  primer
acagagggcaatttcacagg

SEQ ID NO: 120505 - DNA, 21 bp, Artificial Sequence
  primer
aattcttgcagtcctccctcc

SEQ ID NO: 120506 - DNA, 38 bp, Artificial Sequence
  primer
gtaaaacgacggccagtttcagagcaggcagcagttag

SEQ ID NO: 120507 - DNA, 21 bp, Artificial Sequence
  primer
ccttcgtcctttgtttctgtg

SEQ ID NO: 120508 - DNA, 24 bp, Artificial Sequence
  primer
gagctctgacaaacagttaaagcc

SEQ ID NO: 120509 - DNA, 40 bp, Artificial Sequence
  primer
gtaaaacgacggccagtaacctctaaaggccacatagtcc

SEQ ID NO: 120510 - DNA, 38 bp, Artificial Sequence
  primer
gtaaaacgacggccagtacaatctaagctgcaccaggc

SEQ ID NO: 120511 - DNA, 38 bp, Artificial Sequence
  primer
gtaaaacgacggccagtaagcctacgagttgatcctgg

SEQ ID NO: 120512 - DNA, 22 bp, Artificial Sequence
  primer
tcaagtctggattgaaaggagg

SEQ ID NO: 120513 - DNA, 38 bp, Artificial Sequence
  primer
gtaaaacgacggccagtagtcgtcattgtagccttggg

SEQ ID NO: 120514 - DNA, 38 bp, Artificial Sequence
  primer
gtaaaacgacggccagtagagccaccatttgtacccag

SEQ ID NO: 120515 - DNA, 39 bp, Artificial Sequence
  primer
gtaaaacgacggccagtggataataggacaggtccaggg

SEQ ID NO: 120516 - DNA, 20 bp, Artificial Sequence
  primer
ccactgctaaggcagtcagc

SEQ ID NO: 120517 - DNA, 21 bp, Artificial Sequence
  primer
ttagcaacctgactggctgtg

SEQ ID NO: 120518 - DNA, 38 bp, Artificial Sequence
  primer
gtaaaacgacggccagtcttccctggaccttctgactc

SEQ ID NO: 120519 - DNA, 38 bp, Artificial Sequence
  primer
gtaaaacgacggccagtaagtgacactgcaaggcacag

SEQ ID NO: 120520 - DNA, 38 bp, Artificial Sequence
  primer
gtaaaacgacggccagttgaatgtgccatctgtcttcc

SEQ ID NO: 120521 - DNA, 38 bp, Artificial Sequence
  primer
gtaaaacgacggccagttcatagtgctgtccaggcttc

SEQ ID NO: 120522 - DNA, 21 bp, Artificial Sequence
  primer
cctgtttccctcttcttggag

SEQ ID NO: 120523 - DNA, 21 bp, Artificial Sequence
  primer
gtagctgcagatccaccaatg

SEQ ID NO: 120524 - DNA, 38 bp, Artificial Sequence
  primer
gtaaaacgacggccagttgagagacaatgggctgactg

SEQ ID NO: 120525 - DNA, 21 bp, Artificial Sequence
  primer
ctgggtcagcattagcaacac

SEQ ID NO: 120526 - DNA, 21 bp, Artificial Sequence
  primer
cctcacctaggcttgtgttcc

SEQ ID NO: 120527 - DNA, 20 bp, Artificial Sequence
  primer
agtctccattcggcacaaac

SEQ ID NO: 120528 - DNA, 20 bp, Artificial Sequence
  primer
acagctccagggctgaaatc

SEQ ID NO: 120529 - DNA, 21 bp, Artificial Sequence
  primer
tggatcagagaggagtcctgg

SEQ ID NO: 120530 - DNA, 21 bp, Artificial Sequence
  primer
cctgagcagaggtgaccattc

SEQ ID NO: 120531 - DNA, 20 bp, Artificial Sequence
  primer
ccgggacacacagctgatag

SEQ ID NO: 120532 - DNA, 21 bp, Artificial Sequence
  primer
cctgctgtgcagaaggagaag

SEQ ID NO: 120533 - DNA, 38 bp, Artificial Sequence
  primer
gtaaaacgacggccagtgttggctgtggtcaggaagag

SEQ ID NO: 120534 - DNA, 21 bp, Artificial Sequence
  primer
agacctgctcagccagagaac

SEQ ID NO: 120535 - DNA, 22 bp, Artificial Sequence
  primer
tgctttctacatccactctggg

SEQ ID NO: 120536 - DNA, 21 bp, Artificial Sequence
  primer
accgagacatggttaaggctg

SEQ ID NO: 120537 - DNA, 38 bp, Artificial Sequence
  primer
gtaaaacgacggccagtactcagccaggaagctactgc

SEQ ID NO: 120538 - DNA, 21 bp, Artificial Sequence
  primer
ctcacgcacatcactgacaac

SEQ ID NO: 120539 - DNA, 38 bp, Artificial Sequence
  primer
gtaaaacgacggccagtagggtgtggaactgtcatgtg

SEQ ID NO: 120540 - DNA, 21 bp, Artificial Sequence
  primer
tcatcttccagcagtcagctc

SEQ ID NO: 120541 - DNA, 37 bp, Artificial Sequence
  primer
gtaaaacgacggccagtctgatgctacctttgctccg

SEQ ID NO: 120542 - DNA, 21 bp, Artificial Sequence
  primer
agcactgactgtgtctgagcc

SEQ ID NO: 120543 - DNA, 38 bp, Artificial Sequence
  primer
gtaaaacgacggccagtagttaccaaactgccctgagc

SEQ ID NO: 120544 - DNA, 20 bp, Artificial Sequence
  primer
ctagggagggacactggagg

SEQ ID NO: 120545 - DNA, 39 bp, Artificial Sequence
  primer
gtaaaacgacggccagtcccactagagggttaagttggg

SEQ ID NO: 120546 - DNA, 38 bp, Artificial Sequence
  primer
gtaaaacgacggccagtcaagtagatgaaagggcccag

SEQ ID NO: 120547 - DNA, 37 bp, Artificial Sequence
  primer
gtaaaacgacggccagtacatgtggcctatcgtgagc

SEQ ID NO: 120548 - DNA, 21 bp, Artificial Sequence
  primer
tatgtgaccaggactcccagg

SEQ ID NO: 120549 - DNA, 21 bp, Artificial Sequence
  primer
ggatacaagggtggatgatgg

SEQ ID NO: 120550 - DNA, 21 bp, Artificial Sequence
  primer
cacgcagtccctgtgtaagag

SEQ ID NO: 120551 - DNA, 38 bp, Artificial Sequence
  primer
gtaaaacgacggccagtagggagggttagaagctctgg

SEQ ID NO: 120552 - DNA, 38 bp, Artificial Sequence
  primer
gtaaaacgacggccagtctgggagaccaggctgtagtg

SEQ ID NO: 120553 - DNA, 21 bp, Artificial Sequence
  primer
ggaaccagtcattgagggaag

SEQ ID NO: 120554 - DNA, 38 bp, Artificial Sequence
  primer
gtaaaacgacggccagtttaataaatatggacgggcgg

SEQ ID NO: 120555 - DNA, 19 bp, Artificial Sequence
  primer
cctccagctctcgttccag

SEQ ID NO: 120556 - DNA, 38 bp, Artificial Sequence
  primer
gtaaaacgacggccagttgctcagcctttgtctgtgag

SEQ ID NO: 120557 - DNA, 38 bp, Artificial Sequence
  primer
gtaaaacgacggccagtagctacggaggaaaggaaagc

SEQ ID NO: 120558 - DNA, 21 bp, Artificial Sequence
  primer
caccaaggcctgaacagtacc

SEQ ID NO: 120559 - DNA, 38 bp, Artificial Sequence
  primer
gtaaaacgacggccagttggcatgttggaactagagtg

SEQ ID NO: 120560 - DNA, 21 bp, Artificial Sequence
  primer
acacctcgcctgttccagtag

SEQ ID NO: 120561 - DNA, 21 bp, Artificial Sequence
  primer
cctttaaggaaggctgatccc

SEQ ID NO: 120562 - DNA, 19 bp, Artificial Sequence
  primer
tcatttcctgccacacagc

SEQ ID NO: 120563 - DNA, 18 bp, Artificial Sequence
  primer
gcatgagctgagatggcg

SEQ ID NO: 120564 - DNA, 21 bp, Artificial Sequence
  primer
agtcctttctcagtccctccc

SEQ ID NO: 120565 - DNA, 41 bp, Artificial Sequence
  primer
gtaaaacgacggccagttctcttgcaatcactgctgtactc

SEQ ID NO: 120566 - DNA, 21 bp, Artificial Sequence
  primer
gagaccagagaccctaggcag

SEQ ID NO: 120567 - DNA, 38 bp, Artificial Sequence
  primer
gtaaaacgacggccagtcccatgtcctcacaatcatcc

SEQ ID NO: 120568 - DNA, 20 bp, Artificial Sequence
  primer
ctgatggatgggcttctcac

SEQ ID NO: 120569 - DNA, 21 bp, Artificial Sequence
  primer
ccctgcttcatacagactccc

SEQ ID NO: 120570 - DNA, 19 bp, Artificial Sequence
  primer
tctctggcatagagcacgg

SEQ ID NO: 120571 - DNA, 35 bp, Artificial Sequence
  primer
gtaaaacgacggccagtgcagcagctcctcactgg

SEQ ID NO: 120572 - DNA, 21 bp, Artificial Sequence
  primer
actcagcactgtcactgagcc

SEQ ID NO: 120573 - DNA, 38 bp, Artificial Sequence
  primer
gtaaaacgacggccagtgcccacaacctcttgtaatcc

SEQ ID NO: 120574 - DNA, 37 bp, Artificial Sequence
  primer
gtaaaacgacggccagtcggcctagttcctcttggac

SEQ ID NO: 120575 - DNA, 38 bp, Artificial Sequence
  primer
gtaaaacgacggccagtctctgtagcatgctctgtggc

SEQ ID NO: 120576 - DNA, 21 bp, Artificial Sequence
  primer
acagtgtccaaccgttcacag

SEQ ID NO: 120577 - DNA, 21 bp, Artificial Sequence
  primer
agcagatgagttggaagctgg

SEQ ID NO: 120578 - DNA, 21 bp, Artificial Sequence
  primer
ttcagagtggaatgtcaagcc

SEQ ID NO: 120579 - DNA, 21 bp, Artificial Sequence
  primer
tgggaagggtggatgttaaag

SEQ ID NO: 120580 - DNA, 22 bp, Artificial Sequence
  primer
aataaatgaagaaagagccggg

SEQ ID NO: 120581 - DNA, 35 bp, Artificial Sequence
  primer
gtaaaacgacggccagtctcgtcgtctttggcagg

SEQ ID NO: 120582 - DNA, 38 bp, Artificial Sequence
  primer
gtaaaacgacggccagtgatttaccggagggactggag

SEQ ID NO: 120583 - DNA, 21 bp, Artificial Sequence
  primer
ggccctagcaaagcaatttac

SEQ ID NO: 120584 - DNA, 21 bp, Artificial Sequence
  primer
taacagtggtgtcaggcttgg

SEQ ID NO: 120585 - DNA, 21 bp, Artificial Sequence
  primer
ttcgttggttgtcatggtcac

SEQ ID NO: 120586 - DNA, 21 bp, Artificial Sequence
  primer
atccacatctggctctggaac

SEQ ID NO: 120587 - DNA, 38 bp, Artificial Sequence
  primer
gtaaaacgacggccagtcagcaggcaaatgtcttcaac

SEQ ID NO: 120588 - DNA, 21 bp, Artificial Sequence
  primer
cagggtgtccactgtcctttc

SEQ ID NO: 120589 - DNA, 21 bp, Artificial Sequence
  primer
gacgtggctgtagaactgctg

SEQ ID NO: 120590 - DNA, 19 bp, Artificial Sequence
  primer
aaatgttgttgcgtgctgc

SEQ ID NO: 120591 - DNA, 34 bp, Artificial Sequence
  primer
gtaaaacgacggccagtcctcagcagaccccgag

SEQ ID NO: 120592 - DNA, 21 bp, Artificial Sequence
  primer
ttgtgctaatagcctggaggg

SEQ ID NO: 120593 - DNA, 21 bp, Artificial Sequence
  primer
tacgtgaaagcccacagagtc

SEQ ID NO: 120594 - DNA, 39 bp, Artificial Sequence
  primer
gtaaaacgacggccagttgcttccattacatacaaaccg

SEQ ID NO: 120595 - DNA, 35 bp, Artificial Sequence
  primer
gtaaaacgacggccagtcactgccaggatcccaag

SEQ ID NO: 120596 - DNA, 20 bp, Artificial Sequence
  primer
gagttggcagctgctctcag

SEQ ID NO: 120597 - DNA, 38 bp, Artificial Sequence
  primer
gtaaaacgacggccagtactccctcagctttatggtgg

SEQ ID NO: 120598 - DNA, 21 bp, Artificial Sequence
  primer
tagaagctgcaccttggtctg

SEQ ID NO: 120599 - DNA, 38 bp, Artificial Sequence
  primer
gtaaaacgacggccagtattgatcaaggctagttgccc

SEQ ID NO: 120600 - DNA, 38 bp, Artificial Sequence
  primer
gtaaaacgacggccagtgtccaacctcagacagcatcc

SEQ ID NO: 120601 - DNA, 21 bp, Artificial Sequence
  primer
tggctgacagagtcactgagg

SEQ ID NO: 120602 - DNA, 21 bp, Artificial Sequence
  primer
gtgcacgaagtctccagtgag

SEQ ID NO: 120603 - DNA, 38 bp, Artificial Sequence
  primer
gtaaaacgacggccagtaaagtgtcccactgtgtgctg

SEQ ID NO: 120604 - DNA, 20 bp, Artificial Sequence
  primer
ctggccagcctgtctagttg

SEQ ID NO: 120605 - DNA, 37 bp, Artificial Sequence
  primer
gtaaaacgacggccagtcctccttagtgccatttggg

SEQ ID NO: 120606 - DNA, 20 bp, Artificial Sequence
  primer
tggaggaccagttgagcatc

SEQ ID NO: 120607 - DNA, 39 bp, Artificial Sequence
  primer
gtaaaacgacggccagtcgtgtgattatgttgacagtgc

SEQ ID NO: 120608 - DNA, 22 bp, Artificial Sequence
  primer
gaggtttcaaaggcaacacaag

SEQ ID NO: 120609 - DNA, 22 bp, Artificial Sequence
  primer
tcccagcttgttggaatatgag

SEQ ID NO: 120610 - DNA, 21 bp, Artificial Sequence
  primer
aggtacaaagctccatctggg

SEQ ID NO: 120611 - DNA, 23 bp, Artificial Sequence
  primer
ttcgttcaggaatgataagttgg

SEQ ID NO: 120612 - DNA, 38 bp, Artificial Sequence
  primer
gtaaaacgacggccagtcacctgtgcaacaggaatcac

SEQ ID NO: 120613 - DNA, 38 bp, Artificial Sequence
  primer
gtaaaacgacggccagtgccttactcagcagcacaatg

SEQ ID NO: 120614 - DNA, 21 bp, Artificial Sequence
  primer
ctgtacatacacccaggcagg

SEQ ID NO: 120615 - DNA, 21 bp, Artificial Sequence
  primer
gtgaaggcgtcatacacaagg

SEQ ID NO: 120616 - DNA, 21 bp, Artificial Sequence
  primer
cacgcttcccaactatgtgag

SEQ ID NO: 120617 - DNA, 38 bp, Artificial Sequence
  primer
gtaaaacgacggccagtttccatcataatagcttgggc

SEQ ID NO: 120618 - DNA, 27 bp, Artificial Sequence
  primer
cccatataatgtgatttcacctaaaca

SEQ ID NO: 120619 - DNA, 40 bp, Artificial Sequence
  primer
gtaaaacgacggccagtaaagcacctgattgtaatgcttg

SEQ ID NO: 120620 - DNA, 24 bp, Artificial Sequence
  primer
aaataacatttgctttgggacaac

SEQ ID NO: 120621 - DNA, 38 bp, Artificial Sequence
  primer
gtaaaacgacggccagtttcgaacatgtagccaagagc

SEQ ID NO: 120622 - DNA, 19 bp, Artificial Sequence
  primer
acacatggacacactgggc

SEQ ID NO: 120623 - DNA, 38 bp, Artificial Sequence
  primer
gtaaaacgacggccagtaatgaagctggaatgaccctg

SEQ ID NO: 120624 - DNA, 21 bp, Artificial Sequence
  primer
tgacctagagatgatggcacg

SEQ ID NO: 120625 - DNA, 39 bp, Artificial Sequence
  primer
gtaaaacgacggccagttgacaagactggtgaccatgag

SEQ ID NO: 120626 - DNA, 21 bp, Artificial Sequence
  primer
tcacagcccatttccacttag

SEQ ID NO: 120627 - DNA, 21 bp, Artificial Sequence
  primer
cacgctaagctaaggtagccg

SEQ ID NO: 120628 - DNA, 21 bp, Artificial Sequence
  primer
cacaccaaacgtcaagcagag

SEQ ID NO: 120629 - DNA, 38 bp, Artificial Sequence
  primer
gtaaaacgacggccagtagccaagactcctgacctctg

SEQ ID NO: 120630 - DNA, 38 bp, Artificial Sequence
  primer
gtaaaacgacggccagttcaaacgatcctcccaaagtg

SEQ ID NO: 120631 - DNA, 21 bp, Artificial Sequence
  primer
ccactaaattcagcctgaggg

SEQ ID NO: 120632 - DNA, 38 bp, Artificial Sequence
  primer
gtaaaacgacggccagtcagcacgtgtaaggtggagag

SEQ ID NO: 120633 - DNA, 36 bp, Artificial Sequence
  primer
gtaaaacgacggccagtgacacgccctcattgtgac

SEQ ID NO: 120634 - DNA, 38 bp, Artificial Sequence
  primer
gtaaaacgacggccagtcacgggtctatctgattgcag

SEQ ID NO: 120635 - DNA, 21 bp, Artificial Sequence
  primer
atctcagcgtccctgtaatcc

SEQ ID NO: 120636 - DNA, 38 bp, Artificial Sequence
  primer
gtaaaacgacggccagtcacaagcagaattccacgaag

SEQ ID NO: 120637 - DNA, 21 bp, Artificial Sequence
  primer
agatgagtaggatgcacacgg

SEQ ID NO: 120638 - DNA, 38 bp, Artificial Sequence
  primer
gtaaaacgacggccagtaggtgaggagaactgggagtg

SEQ ID NO: 120639 - DNA, 41 bp, Artificial Sequence
  primer
gtaaaacgacggccagtttgtttggtttcagtctaatgtgc

SEQ ID NO: 120640 - DNA, 38 bp, Artificial Sequence
  primer
gtaaaacgacggccagttaggaaagagggaagaagggc

SEQ ID NO: 120641 - DNA, 38 bp, Artificial Sequence
  primer
gtaaaacgacggccagttacaccaagttgtcgtgggag

SEQ ID NO: 120642 - DNA, 38 bp, Artificial Sequence
  primer
gtaaaacgacggccagttgatcagggcagaatcagttg

SEQ ID NO: 120643 - DNA, 21 bp, Artificial Sequence
  primer
cttgaataccaagggagcgag

SEQ ID NO: 120644 - DNA, 21 bp, Artificial Sequence
  primer
cttcccacactggaggtaagc

SEQ ID NO: 120645 - DNA, 21 bp, Artificial Sequence
  primer
ggcccttgggatcaagactac

SEQ ID NO: 120646 - DNA, 21 bp, Artificial Sequence
  primer
tatgtcagtctaccctcccgc

SEQ ID NO: 120647 - DNA, 21 bp, Artificial Sequence
  primer
acagaggagagttggacatgg

SEQ ID NO: 120648 - DNA, 21 bp, Artificial Sequence
  primer
tcagttcctgccctgagtaaa

SEQ ID NO: 120649 - DNA, 38 bp, Artificial Sequence
  primer
gtaaaacgacggccagtgacaggcatgatgagtgcaag

SEQ ID NO: 120650 - DNA, 41 bp, Artificial Sequence
  primer
gtaaaacgacggccagttttctctcagaatccttggatagc

SEQ ID NO: 120651 - DNA, 18 bp, Artificial Sequence
  primer
ccaagatggtgccactgc

SEQ ID NO: 120652 - DNA, 23 bp, Artificial Sequence
  primer
tgcgtagcttattcttaccttgg

SEQ ID NO: 120653 - DNA, 18 bp, Artificial Sequence
  primer
gcctggcctgatgtttcc

SEQ ID NO: 120654 - DNA, 18 bp, Artificial Sequence
  primer
tttggaggccgaaagtcc

SEQ ID NO: 120655 - DNA, 29 bp, Artificial Sequence
  primer
cagtaaatagcttcttaagggagaacact

SEQ ID NO: 120656 - DNA, 41 bp, Artificial Sequence
  primer
gtaaaacgacggccagtcaactcaggattatcacttcatgg

SEQ ID NO: 120657 - DNA, 27 bp, Artificial Sequence
  primer
aataccaatatagttccaaatacctgc

SEQ ID NO: 120658 - DNA, 21 bp, Artificial Sequence
  primer
catgactccacctgagtctcc

SEQ ID NO: 120659 - DNA, 38 bp, Artificial Sequence
  primer
gtaaaacgacggccagtgcagctctttctctcctggtc

SEQ ID NO: 120660 - DNA, 39 bp, Artificial Sequence
  primer
gtaaaacgacggccagtaaggcaacaacaaactcctttc

SEQ ID NO: 120661 - DNA, 38 bp, Artificial Sequence
  primer
gtaaaacgacggccagtatctttgaagggatgtgtggc

SEQ ID NO: 120662 - DNA, 38 bp, Artificial Sequence
  primer
gtaaaacgacggccagtactttgctgctctcaactgcc

SEQ ID NO: 120663 - DNA, 21 bp, Artificial Sequence
  primer
ggcttcacaggacaggaattt

SEQ ID NO: 120664 - DNA, 36 bp, Artificial Sequence
  primer
gtaaaacgacggccagtttgcagtttctggcagcag

SEQ ID NO: 120665 - DNA, 22 bp, Artificial Sequence
  primer
gcagctaacgacaggaaacaac

SEQ ID NO: 120666 - DNA, 21 bp, Artificial Sequence
  primer
tgcacaattcagattccatgc

SEQ ID NO: 120667 - DNA, 38 bp, Artificial Sequence
  primer
gtaaaacgacggccagtaatcccatgttggttcaatcc

SEQ ID NO: 120668 - DNA, 39 bp, Artificial Sequence
  primer
gtaaaacgacggccagtgcactggagtatcatggagagg

SEQ ID NO: 120669 - DNA, 37 bp, Artificial Sequence
  primer
gtaaaacgacggccagtgaagggtcttgctggtcctc

SEQ ID NO: 120670 - DNA, 38 bp, Artificial Sequence
  primer
gtaaaacgacggccagtatcactgcccatcctgttacc

SEQ ID NO: 120671 - DNA, 21 bp, Artificial Sequence
  primer
cagagagacagctgcggattc

SEQ ID NO: 120672 - DNA, 19 bp, Artificial Sequence
  primer
cccacctccacctttggac

SEQ ID NO: 120673 - DNA, 26 bp, Artificial Sequence
  primer
catatgacctatctggcaataacaaa

SEQ ID NO: 120674 - DNA, 22 bp, Artificial Sequence
  primer
gatggacacagtaaatcctgcc

SEQ ID NO: 120675 - DNA, 25 bp, Artificial Sequence
  primer
aagcaaccaaactgactagaaacaa

SEQ ID NO: 120676 - DNA, 38 bp, Artificial Sequence
  primer
gtaaaacgacggccagtatgcatacagggtgaagaggc

SEQ ID NO: 120677 - DNA, 38 bp, Artificial Sequence
  primer
gtaaaacgacggccagtggtctcaatcccttgaccttg

SEQ ID NO: 120678 - DNA, 18 bp, Artificial Sequence
  primer
cccaaaccaaggcttctg

SEQ ID NO: 120679 - DNA, 44 bp, Artificial Sequence
  primer
gtaaaacgacggccagtaaagtctacaatgcctgaaatattagc

SEQ ID NO: 120680 - DNA, 22 bp, Artificial Sequence
  primer
aatgaaacccttcaccaatcag

SEQ ID NO: 120681 - DNA, 41 bp, Artificial Sequence
  primer
gtaaaacgacggccagtacactgttaacttatgaggccaga

SEQ ID NO: 120682 - DNA, 22 bp, Artificial Sequence
  primer
ggcaaatagaaggcaagcatac

SEQ ID NO: 120683 - DNA, 38 bp, Artificial Sequence
  primer
gtaaaacgacggccagtgggcaatgttgtatcctttcg

SEQ ID NO: 120684 - DNA, 38 bp, Artificial Sequence
  primer
gtaaaacgacggccagtcaagccagagctatgagttcc

SEQ ID NO: 120685 - DNA, 44 bp, Artificial Sequence
  primer
gtaaaacgacggccagtgctaaatgacaagcttaggtaacactg

SEQ ID NO: 120686 - DNA, 40 bp, Artificial Sequence
  primer
gtaaaacgacggccagtaaagtgggttcacaagggataaa

SEQ ID NO: 120687 - DNA, 21 bp, Artificial Sequence
  primer
ctgctctattccaggatgcag

SEQ ID NO: 120688 - DNA, 38 bp, Artificial Sequence
  primer
gtaaaacgacggccagttccaggcaagtagaaaggcag

SEQ ID NO: 120689 - DNA, 37 bp, Artificial Sequence
  primer
gtaaaacgacggccagtcatgccatgtgttccacctc

SEQ ID NO: 120690 - DNA, 23 bp, Artificial Sequence
  primer
tttactgacacccaatcatttca

SEQ ID NO: 120691 - DNA, 38 bp, Artificial Sequence
  primer
gtaaaacgacggccagtctatgtggcaccatgagcaag

SEQ ID NO: 120692 - DNA, 21 bp, Artificial Sequence
  primer
tgcaccaatctaacaacaggg

SEQ ID NO: 120693 - DNA, 21 bp, Artificial Sequence
  primer
attgtaccacagcattccagc

SEQ ID NO: 120694 - DNA, 38 bp, Artificial Sequence
  primer
gtaaaacgacggccagttgtttcttccttcacccatgt

SEQ ID NO: 120695 - DNA, 41 bp, Artificial Sequence
  primer
gtaaaacgacggccagtgaagtgctatgacaggacattacc

SEQ ID NO: 120696 - DNA, 43 bp, Artificial Sequence
  primer
gtaaaacgacggccagtttattacttgctttaacttccacagc

SEQ ID NO: 120697 - DNA, 20 bp, Artificial Sequence
  primer
tcacccaggctgataccaaa

SEQ ID NO: 120698 - DNA, 23 bp, Artificial Sequence
  primer
cgagcctctgaaacttaaagaaa

SEQ ID NO: 120699 - DNA, 26 bp, Artificial Sequence
  primer
tcctctgagatacagttcaattaggg

SEQ ID NO: 120700 - DNA, 24 bp, Artificial Sequence
  primer
ctggagtgtttctcctacatttca

SEQ ID NO: 120701 - DNA, 25 bp, Artificial Sequence
  primer
tggtataattgggtagggctttatg

SEQ ID NO: 120702 - DNA, 38 bp, Artificial Sequence
  primer
gtaaaacgacggccagtcatacctgctcaagccctttg

SEQ ID NO: 120703 - DNA, 23 bp, Artificial Sequence
  primer
gaatgattgtttcaaccaccaac

SEQ ID NO: 120704 - DNA, 39 bp, Artificial Sequence
  primer
gtaaaacgacggccagtgaaatatatgcttgaccagggc

SEQ ID NO: 120705 - DNA, 38 bp, Artificial Sequence
  primer
gtaaaacgacggccagtagcatatgaggaggaaggtcg

SEQ ID NO: 120706 - DNA, 38 bp, Artificial Sequence
  primer
gtaaaacgacggccagtcaaagggtgagggaatcacag

SEQ ID NO: 120707 - DNA, 21 bp, Artificial Sequence
  primer
cacagtacgagcagcatgtcc

SEQ ID NO: 120708 - DNA, 38 bp, Artificial Sequence
  primer
gtaaaacgacggccagtaatacgggaaatgctacaggc

SEQ ID NO: 120709 - DNA, 21 bp, Artificial Sequence
  primer
caaagggaggagttgagaagc

SEQ ID NO: 120710 - DNA, 24 bp, Artificial Sequence
  primer
tccttattggaatggctctaacag

SEQ ID NO: 120711 - DNA, 21 bp, Artificial Sequence
  primer
tcgagggagaggatttgtttc

SEQ ID NO: 120712 - DNA, 41 bp, Artificial Sequence
  primer
gtaaaacgacggccagtaaaccaaagctgtaggagttgttg

SEQ ID NO: 120713 - DNA, 21 bp, Artificial Sequence
  primer
gttagcaccacttgaccatgc

SEQ ID NO: 120714 - DNA, 38 bp, Artificial Sequence
  primer
gtaaaacgacggccagtaagggctgtggcttaaacttc

SEQ ID NO: 120715 - DNA, 21 bp, Artificial Sequence
  primer
agaacaagggcatgaggtcac

SEQ ID NO: 120716 - DNA, 37 bp, Artificial Sequence
  primer
gtaaaacgacggccagttcaagttgccagaaacaccc

SEQ ID NO: 120717 - DNA, 21 bp, Artificial Sequence
  primer
aatggtttgggatttgacctc

SEQ ID NO: 120718 - DNA, 41 bp, Artificial Sequence
  primer
gtaaaacgacggccagtgaacagaccaatacaacccacttc

SEQ ID NO: 120719 - DNA, 38 bp, Artificial Sequence
  primer
gtaaaacgacggccagtgtgagtggaggagagggtacg

SEQ ID NO: 120720 - DNA, 21 bp, Artificial Sequence
  primer
tcctttccaaattctccctcc

SEQ ID NO: 120721 - DNA, 21 bp, Artificial Sequence
  primer
gcagcagttctgaataccagc

SEQ ID NO: 120722 - DNA, 20 bp, Artificial Sequence
  primer
ggtggcaggtgcctctaatc

SEQ ID NO: 120723 - DNA, 21 bp, Artificial Sequence
  primer
gcattagccctaggcactcag

SEQ ID NO: 120724 - DNA, 21 bp, Artificial Sequence
  primer
ctacgagaggcccattctcag

SEQ ID NO: 120725 - DNA, 21 bp, Artificial Sequence
  primer
ggaaggaaggaagatcaaggc

SEQ ID NO: 120726 - DNA, 21 bp, Artificial Sequence
  primer
aacagatggacttccctgagc

SEQ ID NO: 120727 - DNA, 38 bp, Artificial Sequence
  primer
gtaaaacgacggccagtttcacagcttgggaaactgaa

SEQ ID NO: 120728 - DNA, 22 bp, Artificial Sequence
  primer
cctacattcaatacccagccag

SEQ ID NO: 120729 - DNA, 38 bp, Artificial Sequence
  primer
gtaaaacgacggccagtgaagcagtggaagagggtgag

SEQ ID NO: 120730 - DNA, 21 bp, Artificial Sequence
  primer
ccacaggctcaaagtaaaggg

SEQ ID NO: 120731 - DNA, 38 bp, Artificial Sequence
  primer
gtaaaacgacggccagtaaccaagacccaccctaatcc

SEQ ID NO: 120732 - DNA, 21 bp, Artificial Sequence
  primer
accacaggttgatggatcttg

SEQ ID NO: 120733 - DNA, 38 bp, Artificial Sequence
  primer
gtaaaacgacggccagtaagaggaagatcccgaggttg

SEQ ID NO: 120734 - DNA, 21 bp, Artificial Sequence
  primer
gcacagcttacactcagcagg

SEQ ID NO: 120735 - DNA, 38 bp, Artificial Sequence
  primer
gtaaaacgacggccagtagctggtactatgggcacctg

SEQ ID NO: 120736 - DNA, 39 bp, Artificial Sequence
  primer
gtaaaacgacggccagtggaatatcccattgccaaagtc

SEQ ID NO: 120737 - DNA, 38 bp, Artificial Sequence
  primer
gtaaaacgacggccagttggtcttggcacctagaaagg

SEQ ID NO: 120738 - DNA, 38 bp, Artificial Sequence
  primer
gtaaaacgacggccagtcttaccggcctcaatagcttc

SEQ ID NO: 120739 - DNA, 36 bp, Artificial Sequence
  primer
gtaaaacgacggccagtactccatcccacaacaccc

SEQ ID NO: 120740 - DNA, 21 bp, Artificial Sequence
  primer
acagggatagagggagttggc

SEQ ID NO: 120741 - DNA, 38 bp, Artificial Sequence
  primer
gtaaaacgacggccagttggtggtcctgaaaccaatag

SEQ ID NO: 120742 - DNA, 22 bp, Artificial Sequence
  primer
ttgatgggaataagtgaccctc

SEQ ID NO: 120743 - DNA, 38 bp, Artificial Sequence
  primer
gtaaaacgacggccagttctgtctcaggcataggaccc

SEQ ID NO: 120744 - DNA, 21 bp, Artificial Sequence
  primer
agggaaatggtccagtgacag

SEQ ID NO: 120745 - DNA, 38 bp, Artificial Sequence
  primer
gtaaaacgacggccagtcctcagctcccattcagtacc

SEQ ID NO: 120746 - DNA, 38 bp, Artificial Sequence
  primer
gtaaaacgacggccagtttgaagaagttgcagagcacg

SEQ ID NO: 120747 - DNA, 21 bp, Artificial Sequence
  primer
gaatgaacgcctgacacagtc

SEQ ID NO: 120748 - DNA, 21 bp, Artificial Sequence
  primer
ctgctttggaggacctgactc

SEQ ID NO: 120749 - DNA, 38 bp, Artificial Sequence
  primer
gtaaaacgacggccagtgaccatgtggctttctccatc

SEQ ID NO: 120750 - DNA, 21 bp, Artificial Sequence
  primer
aaagagctgaaccctggattg

SEQ ID NO: 120751 - DNA, 38 bp, Artificial Sequence
  primer
gtaaaacgacggccagtacacctgccctctttctcttt

SEQ ID NO: 120752 - DNA, 20 bp, Artificial Sequence
  primer
ggatgctgcagaaacagctc

SEQ ID NO: 120753 - DNA, 20 bp, Artificial Sequence
  primer
ctggcttgtagtctctgccc

SEQ ID NO: 120754 - DNA, 39 bp, Artificial Sequence
  primer
gtaaaacgacggccagtcacttgggtgtccattagcttc

SEQ ID NO: 120755 - DNA, 21 bp, Artificial Sequence
  primer
acaggtgtggtcacttggctc

SEQ ID NO: 120756 - DNA, 38 bp, Artificial Sequence
  primer
gtaaaacgacggccagtctccaaacatcccacacttcc

SEQ ID NO: 120757 - DNA, 21 bp, Artificial Sequence
  primer
ggaaggactgactttcctggg

SEQ ID NO: 120758 - DNA, 20 bp, Artificial Sequence
  primer
aaggctgctacgtctctggg

SEQ ID NO: 120759 - DNA, 35 bp, Artificial Sequence
  primer
gtaaaacgacggccagtcaaatgccgcatcattcc

SEQ ID NO: 120760 - DNA, 21 bp, Artificial Sequence
  primer
gagctgcagtgtaatccaacc

SEQ ID NO: 120761 - DNA, 38 bp, Artificial Sequence
  primer
gtaaaacgacggccagtctaacccaacccatgacaacc

SEQ ID NO: 120762 - DNA, 37 bp, Artificial Sequence
  primer
gtaaaacgacggccagtagaagggacctcagtggctg

SEQ ID NO: 120763 - DNA, 21 bp, Artificial Sequence
  primer
atttcctgatccctttggacc

SEQ ID NO: 120764 - DNA, 38 bp, Artificial Sequence
  primer
gtaaaacgacggccagtcctgctgtattcccaggtttc

SEQ ID NO: 120765 - DNA, 39 bp, Artificial Sequence
  primer
gtaaaacgacggccagttgctgacatggtgaatttcttg

SEQ ID NO: 120766 - DNA, 21 bp, Artificial Sequence
  primer
cgggtgggaagtttagaacaa

SEQ ID NO: 120767 - DNA, 38 bp, Artificial Sequence
  primer
gtaaaacgacggccagtggaaggactgactttcctggg

SEQ ID NO: 120768 - DNA, 21 bp, Artificial Sequence
  primer
aaggaaaccacactccaaagg

SEQ ID NO: 120769 - DNA, 38 bp, Artificial Sequence
  primer
gtaaaacgacggccagtgccttcccaaatattgctctc

SEQ ID NO: 120770 - DNA, 21 bp, Artificial Sequence
  primer
acaggcttgagcaactgtgtc

SEQ ID NO: 120771 - DNA, 36 bp, Artificial Sequence
  primer
gtaaaacgacggccagtgaggtttcagccactgcac

SEQ ID NO: 120772 - DNA, 37 bp, Artificial Sequence
  primer
gtaaaacgacggccagttttgctcactttgggctttg

SEQ ID NO: 120773 - DNA, 19 bp, Artificial Sequence
  primer
tttctcatgcctctgccac

SEQ ID NO: 120774 - DNA, 21 bp, Artificial Sequence
  primer
attgcaaagtccctcccatac

SEQ ID NO: 120775 - DNA, 38 bp, Artificial Sequence
  primer
gtaaaacgacggccagtcctgggatgatacacacatcg

SEQ ID NO: 120776 - DNA, 38 bp, Artificial Sequence
  primer
gtaaaacgacggccagtaagtgctgggattaaaggcat

SEQ ID NO: 120777 - DNA, 38 bp, Artificial Sequence
  primer
gtaaaacgacggccagtccagctacgatctcagaaggg

SEQ ID NO: 120778 - DNA, 21 bp, Artificial Sequence
  primer
atcatcatgaatgctgccctc

SEQ ID NO: 120779 - DNA, 38 bp, Artificial Sequence
  primer
gtaaaacgacggccagtaaccacccaacagtggaaatg

SEQ ID NO: 120780 - DNA, 21 bp, Artificial Sequence
  primer
agtggtcttgctagtcctggg

SEQ ID NO: 120781 - DNA, 26 bp, Artificial Sequence
  primer
gtggaacatttagagaatgtcaactt

SEQ ID NO: 120782 - DNA, 19 bp, Artificial Sequence
  primer
caccatgcccagctaatgc

SEQ ID NO: 120783 - DNA, 21 bp, Artificial Sequence
  primer
tgtggagaacaaacagcttgg

SEQ ID NO: 120784 - DNA, 38 bp, Artificial Sequence
  primer
gtaaaacgacggccagtgggtagaaatggagagggtcc

SEQ ID NO: 120785 - DNA, 39 bp, Artificial Sequence
  primer
gtaaaacgacggccagtcggcagtaacttctaaacagcc

SEQ ID NO: 120786 - DNA, 38 bp, Artificial Sequence
  primer
gtaaaacgacggccagtggaagaggctctaaagacggg

SEQ ID NO: 120787 - DNA, 20 bp, Artificial Sequence
  primer
gcttgtccctctgtcaatgg

SEQ ID NO: 120788 - DNA, 21 bp, Artificial Sequence
  primer
caagtccgggttggagtagac

SEQ ID NO: 120789 - DNA, 38 bp, Artificial Sequence
  primer
gtaaaacgacggccagtacgtaccttggaagcgatgac

SEQ ID NO: 120790 - DNA, 36 bp, Artificial Sequence
  primer
gtaaaacgacggccagtccgcctagtttcccaacag

SEQ ID NO: 120791 - DNA, 38 bp, Artificial Sequence
  primer
gtaaaacgacggccagtcaccttgagacatacatcccg

SEQ ID NO: 120792 - DNA, 21 bp, Artificial Sequence
  primer
tttctcggtgaacgtgtatgc

SEQ ID NO: 120793 - DNA, 38 bp, Artificial Sequence
  primer
gtaaaacgacggccagtggtggacagggtctctacctg

SEQ ID NO: 120794 - DNA, 38 bp, Artificial Sequence
  primer
gtaaaacgacggccagtttggctgagcccataagtagg

SEQ ID NO: 120795 - DNA, 38 bp, Artificial Sequence
  primer
gtaaaacgacggccagtggcgtgagagactggagtacc

SEQ ID NO: 120796 - DNA, 38 bp, Artificial Sequence
  primer
gtaaaacgacggccagtccttggagcagatgctttctc

SEQ ID NO: 120797 - DNA, 21 bp, Artificial Sequence
  primer
cgatgaagaagttggtgatgc

SEQ ID NO: 120798 - DNA, 36 bp, Artificial Sequence
  primer
gtaaaacgacggccagtagaaggccggtccgagtag

SEQ ID NO: 120799 - DNA, 38 bp, Artificial Sequence
  primer
gtaaaacgacggccagtaatgtcgcgtgagtctttgtg

SEQ ID NO: 120800 - DNA, 42 bp, Artificial Sequence
  primer
gtaaaacgacggccagttttatacactggccctttatgattt

SEQ ID NO: 120801 - DNA, 38 bp, Artificial Sequence
  primer
gtaaaacgacggccagtagagaacgatgaagcgagacc

SEQ ID NO: 120802 - DNA, 23 bp, Artificial Sequence
  primer
aaaggtagaaagggtggagagac

SEQ ID NO: 120803 - DNA, 41 bp, Artificial Sequence
  primer
gtaaaacgacggccagttttaacatacacatggcacttcag

SEQ ID NO: 120804 - DNA, 26 bp, Artificial Sequence
  primer
tccagcataacaagtatctggtaact

SEQ ID NO: 120805 - DNA, 38 bp, Artificial Sequence
  primer
gtaaaacgacggccagtaccagcacttgatattctgcg

SEQ ID NO: 120806 - DNA, 39 bp, Artificial Sequence
  primer
gtaaaacgacggccagtatggcttaatcccaaacatctc

SEQ ID NO: 120807 - DNA, 21 bp, Artificial Sequence
  primer
catcctacccatccattcagg

SEQ ID NO: 120808 - DNA, 38 bp, Artificial Sequence
  primer
gtaaaacgacggccagtcgccagggtaaattatttcaa

SEQ ID NO: 120809 - DNA, 41 bp, Artificial Sequence
  primer
gtaaaacgacggccagttctctacgaggaaagaagtgcatc

SEQ ID NO: 120810 - DNA, 41 bp, Artificial Sequence
  primer
gtaaaacgacggccagtgctgacactatttcctgaatgagc

SEQ ID NO: 120811 - DNA, 38 bp, Artificial Sequence
  primer
gtaaaacgacggccagtgtgggaacaaagaactctggc

SEQ ID NO: 120812 - DNA, 23 bp, Artificial Sequence
  primer
tgtccaatactaggaggatcacg

SEQ ID NO: 120813 - DNA, 38 bp, Artificial Sequence
  primer
gtaaaacgacggccagttgtggtgattaccaatccagg

SEQ ID NO: 120814 - DNA, 21 bp, Artificial Sequence
  primer
tcatgcaaactcaatgaaccg

SEQ ID NO: 120815 - DNA, 38 bp, Artificial Sequence
  primer
gtaaaacgacggccagtatggaagtcattgccctcaac

SEQ ID NO: 120816 - DNA, 21 bp, Artificial Sequence
  primer
tccctccttctgtttgtctcc

SEQ ID NO: 120817 - DNA, 21 bp, Artificial Sequence
  primer
atcaatctttggaccactggc

SEQ ID NO: 120818 - DNA, 21 bp, Artificial Sequence
  primer
tgtcatttcctccctgactcc

SEQ ID NO: 120819 - DNA, 38 bp, Artificial Sequence
  primer
gtaaaacgacggccagtacttggtctccatgggatttg

SEQ ID NO: 120820 - DNA, 21 bp, Artificial Sequence
  primer
tacagggtgtttatttggccc

SEQ ID NO: 120821 - DNA, 21 bp, Artificial Sequence
  primer
tgggactggcatataaccctc

SEQ ID NO: 120822 - DNA, 38 bp, Artificial Sequence
  primer
gtaaaacgacggccagtggtggagagatttcttggtgg

SEQ ID NO: 120823 - DNA, 39 bp, Artificial Sequence
  primer
gtaaaacgacggccagtggagaatcatctctctcatccc

SEQ ID NO: 120824 - DNA, 38 bp, Artificial Sequence
  primer
gtaaaacgacggccagtattcctttggctgatttgagg

SEQ ID NO: 120825 - DNA, 22 bp, Artificial Sequence
  primer
cctgctctctataggtggtggc

SEQ ID NO: 120826 - DNA, 38 bp, Artificial Sequence
  primer
gtaaaacgacggccagttagggctggttacctttctgg

SEQ ID NO: 120827 - DNA, 38 bp, Artificial Sequence
  primer
gtaaaacgacggccagttttggctttccctcttctctg

SEQ ID NO: 120828 - DNA, 21 bp, Artificial Sequence
  primer
ttgctgttgcctctcactctc

SEQ ID NO: 120829 - DNA, 21 bp, Artificial Sequence
  primer
ctggtcctgtacattggtccc

SEQ ID NO: 120830 - DNA, 38 bp, Artificial Sequence
  primer
gtaaaacgacggccagtcctgggtcgctactcctattg

SEQ ID NO: 120831 - DNA, 38 bp, Artificial Sequence
  primer
gtaaaacgacggccagtatcccggatgtcttgaaactc

SEQ ID NO: 120832 - DNA, 21 bp, Artificial Sequence
  primer
agtgccagccttactgtctgc

SEQ ID NO: 120833 - DNA, 38 bp, Artificial Sequence
  primer
gtaaaacgacggccagtccaatcgcacatgcactaaac

SEQ ID NO: 120834 - DNA, 21 bp, Artificial Sequence
  primer
gacactggtacctccgaaagc

SEQ ID NO: 120835 - DNA, 21 bp, Artificial Sequence
  primer
ggtgctgacaaatgcagtagg

SEQ ID NO: 120836 - DNA, 41 bp, Artificial Sequence
  primer
gtaaaacgacggccagtacttctgcagtacagtctctgtgg

SEQ ID NO: 120837 - DNA, 38 bp, Artificial Sequence
  primer
gtaaaacgacggccagtgccaggagaactcatacagcc

SEQ ID NO: 120838 - DNA, 38 bp, Artificial Sequence
  primer
gtaaaacgacggccagttcatcactcgagatgaggtcc

SEQ ID NO: 120839 - DNA, 18 bp, Artificial Sequence
  primer
gtctgccatgaggagggc

SEQ ID NO: 120840 - DNA, 21 bp, Artificial Sequence
  primer
tacggtgtcgtacacccagac

SEQ ID NO: 120841 - DNA, 38 bp, Artificial Sequence
  primer
gtaaaacgacggccagtaacaaagagcttcagcttggc

SEQ ID NO: 120842 - DNA, 38 bp, Artificial Sequence
  primer
gtaaaacgacggccagtgagtagggcactgtggtgatg

SEQ ID NO: 120843 - DNA, 38 bp, Artificial Sequence
  primer
gtaaaacgacggccagttttgactccagagcacaccag

SEQ ID NO: 120844 - DNA, 38 bp, Artificial Sequence
  primer
gtaaaacgacggccagtttgctcaggtagaacgtgtcg

SEQ ID NO: 120845 - DNA, 38 bp, Artificial Sequence
  primer
gtaaaacgacggccagttctgcagaagaacaaaccgag

SEQ ID NO: 120846 - DNA, 38 bp, Artificial Sequence
  primer
gtaaaacgacggccagtaactggtattgacccagagcc

SEQ ID NO: 120847 - DNA, 21 bp, Artificial Sequence
  primer
cagtgaagcagcagtgaaacc

SEQ ID NO: 120848 - DNA, 38 bp, Artificial Sequence
  primer
gtaaaacgacggccagttgccattcacactccaggtag

SEQ ID NO: 120849 - DNA, 38 bp, Artificial Sequence
  primer
gtaaaacgacggccagtaggcagggttgatttaaccag

SEQ ID NO: 120850 - DNA, 38 bp, Artificial Sequence
  primer
gtaaaacgacggccagttcccagtggctttctagttcc

SEQ ID NO: 120851 - DNA, 26 bp, Artificial Sequence
  primer
ctaataggcacatcagtacattctcc

SEQ ID NO: 120852 - DNA, 40 bp, Artificial Sequence
  primer
gtaaaacgacggccagttccatcactatattccctatgcc

SEQ ID NO: 120853 - DNA, 21 bp, Artificial Sequence
  primer
ggttcctgactgctccttagc

SEQ ID NO: 120854 - DNA, 21 bp, Artificial Sequence
  primer
gctatgattccaccactgcac

SEQ ID NO: 120855 - DNA, 20 bp, Artificial Sequence
  primer
gcgtgagctcaggatacagg

SEQ ID NO: 120856 - DNA, 21 bp, Artificial Sequence
  primer
tgagatgcccacatcactctc

SEQ ID NO: 120857 - DNA, 38 bp, Artificial Sequence
  primer
gtaaaacgacggccagtctgacccacagagatggacag

SEQ ID NO: 120858 - DNA, 20 bp, Artificial Sequence
  primer
gtgcccaagtttgaggtgtg

SEQ ID NO: 120859 - DNA, 21 bp, Artificial Sequence
  primer
agaaagcgactgtgctctcac

SEQ ID NO: 120860 - DNA, 21 bp, Artificial Sequence
  primer
atgggcataggtgatttgtcc

SEQ ID NO: 120861 - DNA, 38 bp, Artificial Sequence
  primer
gtaaaacgacggccagtgctcacacagaggtgcttcac

SEQ ID NO: 120862 - DNA, 38 bp, Artificial Sequence
  primer
gtaaaacgacggccagtaactaaggcttgcagagggac

SEQ ID NO: 120863 - DNA, 21 bp, Artificial Sequence
  primer
gagactaagccaaccaatggc

SEQ ID NO: 120864 - DNA, 21 bp, Artificial Sequence
  primer
agtcctgctccggtcatacag

SEQ ID NO: 120865 - DNA, 38 bp, Artificial Sequence
  primer
gtaaaacgacggccagtctctggagtcatggtgggaag

SEQ ID NO: 120866 - DNA, 20 bp, Artificial Sequence
  primer
catgtcccttcctgcaaacc

SEQ ID NO: 120867 - DNA, 38 bp, Artificial Sequence
  primer
gtaaaacgacggccagttctaggctgctatggctctgg

SEQ ID NO: 120868 - DNA, 36 bp, Artificial Sequence
  primer
gtaaaacgacggccagtgatgctgtggttggtgctg

SEQ ID NO: 120869 - DNA, 21 bp, Artificial Sequence
  primer
caaccctcacagtcaggaatc

SEQ ID NO: 120870 - DNA, 21 bp, Artificial Sequence
  primer
atcaacatcatgggtcacagc

SEQ ID NO: 120871 - DNA, 38 bp, Artificial Sequence
  primer
gtaaaacgacggccagtcttccataaacaggaaagccc

SEQ ID NO: 120872 - DNA, 38 bp, Artificial Sequence
  primer
gtaaaacgacggccagtctaagatcatgggcctcttcc

SEQ ID NO: 120873 - DNA, 21 bp, Artificial Sequence
  primer
atcaaggcataggaggtctcg

SEQ ID NO: 120874 - DNA, 20 bp, Artificial Sequence
  primer
gatttccacagtggcaggtg

SEQ ID NO: 120875 - DNA, 21 bp, Artificial Sequence
  primer
gggagctggaagttcagacac

SEQ ID NO: 120876 - DNA, 21 bp, Artificial Sequence
  primer
tccagcgagtcctacattctg

SEQ ID NO: 120877 - DNA, 20 bp, Artificial Sequence
  primer
ggacagacatggagcctcac

SEQ ID NO: 120878 - DNA, 21 bp, Artificial Sequence
  primer
ggtcccattctttctcaccag

SEQ ID NO: 120879 - DNA, 38 bp, Artificial Sequence
  primer
gtaaaacgacggccagtaaagctagagctgccaacagg

SEQ ID NO: 120880 - DNA, 21 bp, Artificial Sequence
  primer
aacacagacccacctaccctg

SEQ ID NO: 120881 - DNA, 20 bp, Artificial Sequence
  primer
gaagggatcaatgggaggag

SEQ ID NO: 120882 - DNA, 21 bp, Artificial Sequence
  primer
agagtgggccttctttcttcc

SEQ ID NO: 120883 - DNA, 38 bp, Artificial Sequence
  primer
gtaaaacgacggccagttactgtcggtccttccctctg

SEQ ID NO: 120884 - DNA, 38 bp, Artificial Sequence
  primer
gtaaaacgacggccagttcactttcctcccatcattcc

SEQ ID NO: 120885 - DNA, 20 bp, Artificial Sequence
  primer
ctaggaccctccacgcctac

SEQ ID NO: 120886 - DNA, 21 bp, Artificial Sequence
  primer
tccctggttctcaggttcttc

SEQ ID NO: 120887 - DNA, 38 bp, Artificial Sequence
  primer
gtaaaacgacggccagtgtgaggatgattccaggttcc

SEQ ID NO: 120888 - DNA, 38 bp, Artificial Sequence
  primer
gtaaaacgacggccagtacacctggaaggagagaccag

SEQ ID NO: 120889 - DNA, 21 bp, Artificial Sequence
  primer
ggatttgtcaatcaggccatc

SEQ ID NO: 120890 - DNA, 38 bp, Artificial Sequence
  primer
gtaaaacgacggccagtcagcaagaggtcaggtaagcc

SEQ ID NO: 120891 - DNA, 21 bp, Artificial Sequence
  primer
ctgcttctcctagcttccagc

SEQ ID NO: 120892 - DNA, 21 bp, Artificial Sequence
  primer
tccagtcctctacccattgtg

SEQ ID NO: 120893 - DNA, 21 bp, Artificial Sequence
  primer
cgcttagtttctggaagggtg

SEQ ID NO: 120894 - DNA, 21 bp, Artificial Sequence
  primer
gggacccagaaataacccatc

SEQ ID NO: 120895 - DNA, 21 bp, Artificial Sequence
  primer
ggaccacagcaggagagattc

SEQ ID NO: 120896 - DNA, 22 bp, Artificial Sequence
  primer
gaaaggacctgagactccagtg

SEQ ID NO: 120897 - DNA, 38 bp, Artificial Sequence
  primer
gtaaaacgacggccagtgcaaagcaggtcactgaaatc

SEQ ID NO: 120898 - DNA, 21 bp, Artificial Sequence
  primer
aggtgtgggtaagtcaggtgc

SEQ ID NO: 120899 - DNA, 21 bp, Artificial Sequence
  primer
gggagcattaacctcaaaggc

SEQ ID NO: 120900 - DNA, 21 bp, Artificial Sequence
  primer
gagcctccagcttctcacttg

SEQ ID NO: 120901 - DNA, 21 bp, Artificial Sequence
  primer
agcacacagctgtcttggttg

SEQ ID NO: 120902 - DNA, 21 bp, Artificial Sequence
  primer
cagaagcaatgggttcgaagt

SEQ ID NO: 120903 - DNA, 39 bp, Artificial Sequence
  primer
gtaaaacgacggccagtcaggctagagatgattgcaagg

SEQ ID NO: 120904 - DNA, 38 bp, Artificial Sequence
  primer
gtaaaacgacggccagttcgttgcactcaaaggacatc

SEQ ID NO: 120905 - DNA, 22 bp, Artificial Sequence
  primer
tgcagtgtgtctgtctttcctc

SEQ ID NO: 120906 - DNA, 38 bp, Artificial Sequence
  primer
gtaaaacgacggccagtagcacagccatctgttacgtc

SEQ ID NO: 120907 - DNA, 21 bp, Artificial Sequence
  primer
gttgatttgagggcctagctg

SEQ ID NO: 120908 - DNA, 38 bp, Artificial Sequence
  primer
gtaaaacgacggccagtctgcagtcagaggtcataccc

SEQ ID NO: 120909 - DNA, 38 bp, Artificial Sequence
  primer
gtaaaacgacggccagtagaactggttggcgtgagaag

SEQ ID NO: 120910 - DNA, 39 bp, Artificial Sequence
  primer
gtaaaacgacggccagtaagcctctttcaactctgatgg

SEQ ID NO: 120911 - DNA, 20 bp, Artificial Sequence
  primer
tgtttgagctcgcctactgc

SEQ ID NO: 120912 - DNA, 21 bp, Artificial Sequence
  primer
ggaaatgcaagagggaacaag

SEQ ID NO: 120913 - DNA, 21 bp, Artificial Sequence
  primer
aacacacaactgtgtcctcgg

SEQ ID NO: 120914 - DNA, 21 bp, Artificial Sequence
  primer
aattgcaaaccatcaagggag

SEQ ID NO: 120915 - DNA, 21 bp, Artificial Sequence
  primer
gttcattggtgggtctctgtg

SEQ ID NO: 120916 - DNA, 38 bp, Artificial Sequence
  primer
gtaaaacgacggccagtgtcagaggcaattgaacctcc

SEQ ID NO: 120917 - DNA, 38 bp, Artificial Sequence
  primer
gtaaaacgacggccagtttagctgattcctgagggtgg

SEQ ID NO: 120918 - DNA, 20 bp, Artificial Sequence
  primer
cgcctcccactttacagaag

SEQ ID NO: 120919 - DNA, 38 bp, Artificial Sequence
  primer
gtaaaacgacggccagtaggtcgtagtggactgggttg

SEQ ID NO: 120920 - DNA, 21 bp, Artificial Sequence
  primer
acttgacttgtccgttctccg

SEQ ID NO: 120921 - DNA, 38 bp, Artificial Sequence
  primer
gtaaaacgacggccagtgccgatcaatatcagaccaac

SEQ ID NO: 120922 - DNA, 39 bp, Artificial Sequence
  primer
gtaaaacgacggccagtttcaatgggttctctttcacag

SEQ ID NO: 120923 - DNA, 21 bp, Artificial Sequence
  primer
tatcaagtccacagaccctgg

SEQ ID NO: 120924 - DNA, 38 bp, Artificial Sequence
  primer
gtaaaacgacggccagtcccaagatattgtcggcatag

SEQ ID NO: 120925 - DNA, 24 bp, Artificial Sequence
  primer
tgtggttcaaagtctctttatggc

SEQ ID NO: 120926 - DNA, 21 bp, Artificial Sequence
  primer
tgtacttgccatctgactcgg

SEQ ID NO: 120927 - DNA, 37 bp, Artificial Sequence
  primer
gtaaaacgacggccagttttccaaagctcactggcac

SEQ ID NO: 120928 - DNA, 22 bp, Artificial Sequence
  primer
cagcccaagctgactaagacac

SEQ ID NO: 120929 - DNA, 38 bp, Artificial Sequence
  primer
gtaaaacgacggccagtatctgtctggtccaggtgtcc

SEQ ID NO: 120930 - DNA, 21 bp, Artificial Sequence
  primer
caaacctggaaatcacttggc

SEQ ID NO: 120931 - DNA, 38 bp, Artificial Sequence
  primer
gtaaaacgacggccagtccttctcctttggatatgggt

SEQ ID NO: 120932 - DNA, 21 bp, Artificial Sequence
  primer
tgtctgggaagagggagaaag

SEQ ID NO: 120933 - DNA, 44 bp, Artificial Sequence
  primer
gtaaaacgacggccagttgtgtataccttaagggctaatgtcag

SEQ ID NO: 120934 - DNA, 38 bp, Artificial Sequence
  primer
gtaaaacgacggccagtcccaagagctccttctctcag

SEQ ID NO: 120935 - DNA, 21 bp, Artificial Sequence
  primer
aaacaaacacaaatccagggc

SEQ ID NO: 120936 - DNA, 38 bp, Artificial Sequence
  primer
gtaaaacgacggccagtcagaagcctgagatttacggg

SEQ ID NO: 120937 - DNA, 23 bp, Artificial Sequence
  primer
catttccttattgtttaggccag

SEQ ID NO: 120938 - DNA, 20 bp, Artificial Sequence
  primer
gtcagagacagtggcccaaa

SEQ ID NO: 120939 - DNA, 19 bp, Artificial Sequence
  primer
aaacctagatggcgggttg

SEQ ID NO: 120940 - DNA, 39 bp, Artificial Sequence
  primer
gtaaaacgacggccagttgtaaattaggccaccaaatgc

SEQ ID NO: 120941 - DNA, 35 bp, Artificial Sequence
  primer
gtaaaacgacggccagtccggaccatgcctctctc

SEQ ID NO: 120942 - DNA, 20 bp, Artificial Sequence
  primer
caagccagcgttgaattgac

SEQ ID NO: 120943 - DNA, 44 bp, Artificial Sequence
  primer
gtaaaacgacggccagtggtaaatcacatacctgaaagacacag

SEQ ID NO: 120944 - DNA, 19 bp, Artificial Sequence
  primer
ggccaatagccatgactcc

SEQ ID NO: 120945 - DNA, 23 bp, Artificial Sequence
  primer
tgcccaaactggtataactcaaa

SEQ ID NO: 120946 - DNA, 42 bp, Artificial Sequence
  primer
gtaaaacgacggccagttttagtgaaacagttaggttctgcc

SEQ ID NO: 120947 - DNA, 38 bp, Artificial Sequence
  primer
gtaaaacgacggccagtgagcaaagatcagaacctggg

SEQ ID NO: 120948 - DNA, 38 bp, Artificial Sequence
  primer
gtaaaacgacggccagtaaagaatggccacagacacac

SEQ ID NO: 120949 - DNA, 22 bp, Artificial Sequence
  primer
agccaacatatcactcaaatgc

SEQ ID NO: 120950 - DNA, 43 bp, Artificial Sequence
  primer
gtaaaacgacggccagttgtggtctaaatcaaacagtatcaaa

SEQ ID NO: 120951 - DNA, 36 bp, Artificial Sequence
  primer
gtaaaacgacggccagtcctccttcaaagcgaggtt

SEQ ID NO: 120952 - DNA, 39 bp, Artificial Sequence
  primer
gtaaaacgacggccagtttgtgcttgataggcacttagg

SEQ ID NO: 120953 - DNA, 35 bp, Artificial Sequence; identical to SEQ ID NO: 9148
  primer

SEQ ID NO: 120954 - DNA, 21 bp, Artificial Sequence
  primer
tacacagcatttccatgttgg

SEQ ID NO: 120955 - DNA, 38 bp, Artificial Sequence
  primer
gtaaaacgacggccagtaggccgacattagaaatcctg

SEQ ID NO: 120956 - DNA, 26 bp, Artificial Sequence
  primer
tgttccattaattctcattcaagaca

SEQ ID NO: 120957 - DNA, 21 bp, Artificial Sequence
  primer
gttgcctacaatgtgacctgc

SEQ ID NO: 120958 - DNA, 21 bp, Artificial Sequence
  primer
tcaagtcacagctccaaggaa

SEQ ID NO: 120959 - DNA, 38 bp, Artificial Sequence
  primer
gtaaaacgacggccagtcaagccagttctctgcatttc

SEQ ID NO: 120960 - DNA, 38 bp, Artificial Sequence
  primer
gtaaaacgacggccagtttcagtgttcctctaatgcgg

SEQ ID NO: 120961 - DNA, 24 bp, Artificial Sequence
  primer
tggtagttctagaccaaatccaca

SEQ ID NO: 120962 - DNA, 40 bp, Artificial Sequence
  primer
gtaaaacgacggccagtaagcgcatcacatactttctcac

SEQ ID NO: 120963 - DNA, 39 bp, Artificial Sequence
  primer
gtaaaacgacggccagtgactcaactggatggtaatccc

SEQ ID NO: 120964 - DNA, 24 bp, Artificial Sequence
  primer
tcactgtaatgtcagatgggtgac

SEQ ID NO: 120965 - DNA, 21 bp, Artificial Sequence
  primer
tacgcaagtttccctgagatg

SEQ ID NO: 120966 - DNA, 21 bp, Artificial Sequence
  primer
cacaaaggtgattcaaatggc

SEQ ID NO: 120967 - DNA, 20 bp, Artificial Sequence
  primer
aaaccacactctcccacctg

SEQ ID NO: 120968 - DNA, 22 bp, Artificial Sequence
  primer
agtttggatagaccaaagcagg

SEQ ID NO: 120969 - DNA, 22 bp, Artificial Sequence
  primer
cctcccaaactcatatccagtg

SEQ ID NO: 120970 - DNA, 40 bp, Artificial Sequence
  primer
gtaaaacgacggccagtcaagacctaccttcaacctttcg

SEQ ID NO: 120971 - DNA, 38 bp, Artificial Sequence
  primer
gtaaaacgacggccagtgtgcccatagatctcaaagcc

SEQ ID NO: 120972 - DNA, 21 bp, Artificial Sequence
  primer
tgctgtgaacaaatgacccag

SEQ ID NO: 120973 - DNA, 23 bp, Artificial Sequence
  primer
cagaaacattgccaagtatgagg

SEQ ID NO: 120974 - DNA, 21 bp, Artificial Sequence
  primer
cacagagggaggatctcagga

SEQ ID NO: 120975 - DNA, 20 bp, Artificial Sequence
  primer
attccaaacattggctgtgc

SEQ ID NO: 120976 - DNA, 43 bp, Artificial Sequence
  primer
gtaaaacgacggccagtaaccttgtagatacaaacatccatcc

SEQ ID NO: 120977 - DNA, 37 bp, Artificial Sequence
  primer
gtaaaacgacggccagtttccaaccaaggcactgaag

SEQ ID NO: 120978 - DNA, 21 bp, Artificial Sequence
  primer
tggagtcttggcttctaaggg

SEQ ID NO: 120979 - DNA, 20 bp, Artificial Sequence
  primer
agctaagcggtagcagagcc

SEQ ID NO: 120980 - DNA, 21 bp, Artificial Sequence
  primer
agggcagtgaggaaagtgttc

SEQ ID NO: 120981 - DNA, 39 bp, Artificial Sequence
  primer
gtaaaacgacggccagtgcactgatggtttatgtagccc

SEQ ID NO: 120982 - DNA, 23 bp, Artificial Sequence
  primer
tgtacaacttcactcacaccacc

SEQ ID NO: 120983 - DNA, 21 bp, Artificial Sequence
  primer
gggaagaggaggtagtcccag

SEQ ID NO: 120984 - DNA, 35 bp, Artificial Sequence
  primer
gtaaaacgacggccagtgccacaagccacataggg

SEQ ID NO: 120985 - DNA, 38 bp, Artificial Sequence
  primer
gtaaaacgacggccagtgctggcatcttgtgtacatgg

SEQ ID NO: 120986 - DNA, 43 bp, Artificial Sequence
  primer
gtaaaacgacggccagttccaacataggatttctgtcattaag

SEQ ID NO: 120987 - DNA, 23 bp, Artificial Sequence
  primer
caagccactgaaattccaaatac

SEQ ID NO: 120988 - DNA, 38 bp, Artificial Sequence
  primer
gtaaaacgacggccagtgccaaccttcctcacagattc

SEQ ID NO: 120989 - DNA, 20 bp, Artificial Sequence
  primer
ttagctggatgtggtggtgc

SEQ ID NO: 120990 - DNA, 24 bp, Artificial Sequence
  primer
catgttaagcaaagttctgtttgg

SEQ ID NO: 120991 - DNA, 38 bp, Artificial Sequence
  primer
gtaaaacgacggccagtaaacagtggagtcattcaggc

SEQ ID NO: 120992 - DNA, 20 bp, Artificial Sequence
  primer
cacaaagcgttctgtcatgg

SEQ ID NO: 120993 - DNA, 36 bp, Artificial Sequence
  primer
gtaaaacgacggccagtaggacagaggaggcttggg

SEQ ID NO: 120994 - DNA, 21 bp, Artificial Sequence
  primer
ggacccaggagatcaagtctg

SEQ ID NO: 120995 - DNA, 39 bp, Artificial Sequence
  primer
gtaaaacgacggccagtgcctagcatggctctaggaaac

SEQ ID NO: 120996 - DNA, 22 bp, Artificial Sequence
  primer
aaattcctctctgcgtctcaac

SEQ ID NO: 120997 - DNA, 40 bp, Artificial Sequence
  primer
gtaaaacgacggccagtgtcagaaagaaagttgcatcctc

SEQ ID NO: 120998 - DNA, 39 bp, Artificial Sequence
  primer
gtaaaacgacggccagtccatgtgcttcagaagggtaag

SEQ ID NO: 120999 - DNA, 39 bp, Artificial Sequence
  primer
gtaaaacgacggccagttgggtgacatagaacttgctcc

SEQ ID NO: 121000 - DNA, 24 bp, Artificial Sequence
  primer
gaattgccaccaagattaagacag

SEQ ID NO: 121001 - DNA, 21 bp, Artificial Sequence
  primer
tccattataaggcaatgccac

SEQ ID NO: 121002 - DNA, 19 bp, Artificial Sequence
  primer
cagttgaaccatggcatcc

SEQ ID NO: 121003 - DNA, 21 bp, Artificial Sequence
  primer
ccacaattcattccttgcttc

SEQ ID NO: 121004 - DNA, 21 bp, Artificial Sequence
  primer
ttcccacttgtttctctgtgg

SEQ ID NO: 121005 - DNA, 20 bp, Artificial Sequence
  primer
aatgggacatcagccctttc

SEQ ID NO: 121006 - DNA, 24 bp, Artificial Sequence
  primer
ttcacagtgatgataatagcaggg

SEQ ID NO: 121007 - DNA, 44 bp, Artificial Sequence
  primer
gtaaaacgacggccagtaagcagtaactaggcttaacatctgag

SEQ ID NO: 121008 - DNA, 38 bp, Artificial Sequence
  primer
gtaaaacgacggccagtcagcctctgggattcagtttg

SEQ ID NO: 121009 - DNA, 38 bp, Artificial Sequence
  primer
gtaaaacgacggccagtcaaacctggttgttgctaccc

SEQ ID NO: 121010 - DNA, 21 bp, Artificial Sequence
  primer
ctggaaccactggaactaccc

SEQ ID NO: 121011 - DNA, 38 bp, Artificial Sequence
  primer
gtaaaacgacggccagtctccctttgaatctctgctgc

SEQ ID NO: 121012 - DNA, 37 bp, Artificial Sequence
  primer
gtaaaacgacggccagttgtttaaggcacatgcccac

SEQ ID NO: 121013 - DNA, 22 bp, Artificial Sequence
  primer
tgtgagggatccttcctatacc

SEQ ID NO: 121014 - DNA, 22 bp, Artificial Sequence
  primer
ttgcccattaattcagcaattt

SEQ ID NO: 121015 - DNA, 42 bp, Artificial Sequence
  primer
gtaaaacgacggccagtcatagagatcaatagcctaaggaaa

SEQ ID NO: 121016 - DNA, 28 bp, Artificial Sequence
  primer
tgtaatatagcatcatctctgtgtgaaa

SEQ ID NO: 121017 - DNA, 20 bp, Artificial Sequence
  primer
atggaattagccacaatgcc

SEQ ID NO: 121018 - DNA, 38 bp, Artificial Sequence
  primer
gtaaaacgacggccagtcacttgcatctggttcttccc

SEQ ID NO: 121019 - DNA, 38 bp, Artificial Sequence
  primer
gtaaaacgacggccagttgggaagtattgcagcaactg

SEQ ID NO: 121020 - DNA, 38 bp, Artificial Sequence
  primer
gtaaaacgacggccagtaaccataggccaactgctctc

SEQ ID NO: 121021 - DNA, 42 bp, Artificial Sequence
  primer
gtaaaacgacggccagttcgaagtaccctcttaacacaacag

SEQ ID NO: 121022 - DNA, 19 bp, Artificial Sequence
  primer
acaatcgcgatggcttctg

SEQ ID NO: 121023 - DNA, 40 bp, Artificial Sequence
  primer
gtaaaacgacggccagtcttattagcaaatgcaccgaaac

SEQ ID NO: 121024 - DNA, 21 bp, Artificial Sequence
  primer
tgcaacaatcccatgattctc

SEQ ID NO: 121025 - DNA, 22 bp, Artificial Sequence
  primer
caatatctgaaatgacaggccc

SEQ ID NO: 121026 - DNA, 38 bp, Artificial Sequence
  primer
gtaaaacgacggccagtactttaaaggcgcagcaacag

SEQ ID NO: 121027 - DNA, 23 bp, Artificial Sequence
  primer
gaaacccaattctacctaaaggg

SEQ ID NO: 121028 - DNA, 21 bp, Artificial Sequence
  primer
tgtataagggaccacccttgg

SEQ ID NO: 121029 - DNA, 38 bp, Artificial Sequence
  primer
gtaaaacgacggccagtaatgtttggaactggtttccc

SEQ ID NO: 121030 - DNA, 36 bp, Artificial Sequence
  primer
gtaaaacgacggccagtgccaggagctcactgttcc

SEQ ID NO: 121031 - DNA, 23 bp, Artificial Sequence
  primer
cagtaacttgacaccgactgtcc

SEQ ID NO: 121032 - DNA, 21 bp, Artificial Sequence
  primer
tgcctgaaatcacttgctcac

SEQ ID NO: 121033 - DNA, 21 bp, Artificial Sequence
  primer
tggcctttagcagtaagaggg

SEQ ID NO: 121034 - DNA, 21 bp, Artificial Sequence
  primer
ctatagacccagctgctcagg

SEQ ID NO: 121035 - DNA, 38 bp, Artificial Sequence
  primer
gtaaaacgacggccagtgcaacaaacgatgcctaagtg

SEQ ID NO: 121036 - DNA, 38 bp, Artificial Sequence
  primer
gtaaaacgacggccagtctgcttggctcataaagaggg

SEQ ID NO: 121037 - DNA, 21 bp, Artificial Sequence
  primer
caatgtgcatggtcttgattg

SEQ ID NO: 121038 - DNA, 37 bp, Artificial Sequence
  primer
gtaaaacgacggccagtcctttatcctgcacgacacg

SEQ ID NO: 121039 - DNA, 38 bp, Artificial Sequence
  primer
gtaaaacgacggccagtgatctcacatggttccaagcc

SEQ ID NO: 121040 - DNA, 21 bp, Artificial Sequence
  primer
gcctccttcttgtagacgtgg

SEQ ID NO: 121041 - DNA, 38 bp, Artificial Sequence
  primer
gtaaaacgacggccagtgtttaaggctgcagtgagctg

SEQ ID NO: 121042 - DNA, 21 bp, Artificial Sequence
  primer
attctggtgttctccaaagcc

SEQ ID NO: 121043 - DNA, 38 bp, Artificial Sequence
  primer
gtaaaacgacggccagtactgtagctgggacatcaggg

SEQ ID NO: 121044 - DNA, 21 bp, Artificial Sequence
  primer
aagcagcatgtcgtgttgaag

SEQ ID NO: 121045 - DNA, 39 bp, Artificial Sequence
  primer
gtaaaacgacggccagtagggaattgataccacatcagg

SEQ ID NO: 121046 - DNA, 21 bp, Artificial Sequence
  primer
gactaggtgcccatttcatcc

SEQ ID NO: 121047 - DNA, 38 bp, Artificial Sequence
  primer
gtaaaacgacggccagtaggttcaaggtcttggtgctc

SEQ ID NO: 121048 - DNA, 38 bp, Artificial Sequence
  primer
gtaaaacgacggccagtggcctgttcatgaggataatg

SEQ ID NO: 121049 - DNA, 21 bp, Artificial Sequence
  primer
gactaggtgcccatttcatcc

SEQ ID NO: 121050 - DNA, 21 bp, Artificial Sequence
  primer
gagaaagttgccgccttaaac

SEQ ID NO: 121051 - DNA, 38 bp, Artificial Sequence
  primer
gtaaaacgacggccagtggccttaatttcctacatggg

SEQ ID NO: 121052 - DNA, 38 bp, Artificial Sequence
  primer
gtaaaacgacggccagtagaaggaagagggtgggaaag

SEQ ID NO: 121053 - DNA, 21 bp, Artificial Sequence
  primer
ttcctgggctgttagaacctc

SEQ ID NO: 121054 - DNA, 37 bp, Artificial Sequence
  primer
gtaaaacgacggccagtcctatgcgtgggactccttt

SEQ ID NO: 121055 - DNA, 38 bp, Artificial Sequence
  primer
gtaaaacgacggccagtggccctttcccataacttcag

SEQ ID NO: 121056 - DNA, 20 bp, Artificial Sequence
  primer
cgacccaagtactgcctgag

SEQ ID NO: 121057 - DNA, 27 bp, Artificial Sequence
  primer
ggtttggaaagtacaataaccaagttc

SEQ ID NO: 121058 - DNA, 38 bp, Artificial Sequence
  primer
gtaaaacgacggccagtgttgagctgaagaaccaaccc

SEQ ID NO: 121059 - DNA, 39 bp, Artificial Sequence
  primer
gtaaaacgacggccagtcaaaccagcaggagtttcagag

SEQ ID NO: 121060 - DNA, 21 bp, Artificial Sequence
  primer
ccaaagctacaccatgctgac

SEQ ID NO: 121061 - DNA, 21 bp, Artificial Sequence
  primer
gaaggatggccttgaacactg

SEQ ID NO: 121062 - DNA, 38 bp, Artificial Sequence
  primer
gtaaaacgacggccagtcaccagcctctctctttccag

SEQ ID NO: 121063 - DNA, 38 bp, Artificial Sequence
  primer
gtaaaacgacggccagttgtgtgagtcactgccatgag

SEQ ID NO: 121064 - DNA, 21 bp, Artificial Sequence
  primer
ctcagctggactggttgtctc

SEQ ID NO: 121065 - DNA, 37 bp, Artificial Sequence
  primer
gtaaaacgacggccagtagaagccttccacagcacag

SEQ ID NO: 121066 - DNA, 38 bp, Artificial Sequence
  primer
gtaaaacgacggccagtatcaggttggtcaggttcagc

SEQ ID NO: 121067 - DNA, 21 bp, Artificial Sequence
  primer
tggaggaatgcaggatacagg

SEQ ID NO: 121068 - DNA, 38 bp, Artificial Sequence; identical to SEQ ID NO: 121066
  primer

SEQ ID NO: 121069 - DNA, 21 bp, Artificial Sequence
  primer
tttatttgaggaatgccggtg

SEQ ID NO: 121070 - DNA, 21 bp, Artificial Sequence
  primer
cagcatgtccagaccttctcc

SEQ ID NO: 121071 - DNA, 21 bp, Artificial Sequence
  primer
gcaacatctcaggacctctcc

SEQ ID NO: 121072 - DNA, 21 bp, Artificial Sequence
  primer
aatttatggcagaatgtgggc

SEQ ID NO: 121073 - DNA, 21 bp, Artificial Sequence
  primer
acagggcagatatccctgatg

SEQ ID NO: 121074 - DNA, 21 bp, Artificial Sequence
  primer
tgaagtggagaggacagaccc

SEQ ID NO: 121075 - DNA, 21 bp, Artificial Sequence
  primer
ggctaacaagtcagcagagga

SEQ ID NO: 121076 - DNA, 24 bp, Artificial Sequence
  primer
tgtgggagtagattcccttattcc

SEQ ID NO: 121077 - DNA, 21 bp, Artificial Sequence
  primer
gtctgatcagcttccacccag

SEQ ID NO: 121078 - DNA, 21 bp, Artificial Sequence
  primer
gtatttcctgaaggcagccac

SEQ ID NO: 121079 - DNA, 22 bp, Artificial Sequence
  primer
aacagaagcacagcacaacttc

SEQ ID NO: 121080 - DNA, 21 bp, Artificial Sequence
  primer
aaacctatggcaccttgatcg

SEQ ID NO: 121081 - DNA, 21 bp, Artificial Sequence
  primer
gaacgatatgaaagacgccac

SEQ ID NO: 121082 - DNA, 21 bp, Artificial Sequence
  primer
ttggtggattctggctaaagg

SEQ ID NO: 121083 - DNA, 43 bp, Artificial Sequence
  primer
gtaaaacgacggccagtggagtataacaaagggtacattggtg

SEQ ID NO: 121084 - DNA, 21 bp, Artificial Sequence
  primer
caactgcagctgctctcattc

SEQ ID NO: 121085 - DNA, 22 bp, Artificial Sequence
  primer
cagccagcacagtaaagatgtg

SEQ ID NO: 121086 - DNA, 21 bp, Artificial Sequence
  primer
gagttcttcccactttgcctg

SEQ ID NO: 121087 - DNA, 21 bp, Artificial Sequence
  primer
gtgaaaggaggacataacccg

SEQ ID NO: 121088 - DNA, 38 bp, Artificial Sequence
  primer
gtaaaacgacggccagtgagaagaagctggactgaggc

SEQ ID NO: 121089 - DNA, 39 bp, Artificial Sequence
  primer
gtaaaacgacggccagtaagcaaacgtcactgtccctac

SEQ ID NO: 121090 - DNA, 18 bp, Artificial Sequence
  primer
cctgacctcatgatccgc

SEQ ID NO: 121091 - DNA, 22 bp, Artificial Sequence
  primer
cagcatatttgtttctgggagg

SEQ ID NO: 121092 - DNA, 38 bp, Artificial Sequence
  primer
gtaaaacgacggccagtttctagccttcttccacccag

SEQ ID NO: 121093 - DNA, 21 bp, Artificial Sequence
  primer
gctttggcagtggtggaatac

SEQ ID NO: 121094 - DNA, 38 bp, Artificial Sequence
  primer
gtaaaacgacggccagtccttctgtttattcctggccc

SEQ ID NO: 121095 - DNA, 38 bp, Artificial Sequence
  primer
gtaaaacgacggccagtttaacaggcatgaactgccac

SEQ ID NO: 121096 - DNA, 38 bp, Artificial Sequence
  primer
gtaaaacgacggccagttgacttgactctgcctaagcg

SEQ ID NO: 121097 - DNA, 38 bp, Artificial Sequence
  primer
gtaaaacgacggccagtgataggccttagggaattggc

SEQ ID NO: 121098 - DNA, 21 bp, Artificial Sequence
  primer
acatttgcctcccaattcaac

SEQ ID NO: 121099 - DNA, 38 bp, Artificial Sequence
  primer
gtaaaacgacggccagtgtccatgacacttggctgatg

SEQ ID NO: 121100 - DNA, 21 bp, Artificial Sequence
  primer
gctctttctccttgaccttcc

SEQ ID NO: 121101 - DNA, 39 bp, Artificial Sequence
  primer
gtaaaacgacggccagttgagctgactgaggtgctttag

SEQ ID NO: 121102 - DNA, 39 bp, Artificial Sequence
  primer
gtaaaacgacggccagtgcacagtaccttgtccatagcc

SEQ ID NO: 121103 - DNA, 21 bp, Artificial Sequence
  primer
tcttgagtggttaggcagcag

SEQ ID NO: 121104 - DNA, 38 bp, Artificial Sequence
  primer
gtaaaacgacggccagtgccacatgtaaatggtgttcc

SEQ ID NO: 121105 - DNA, 36 bp, Artificial Sequence
  primer
gtaaaacgacggccagtaggtgagtctgtggcaggg

SEQ ID NO: 121106 - DNA, 38 bp, Artificial Sequence
  primer
gtaaaacgacggccagtccttcctttgtgaagacagcc

SEQ ID NO: 121107 - DNA, 38 bp, Artificial Sequence
  primer
gtaaaacgacggccagttcagaagcatctgtgtcctgc

SEQ ID NO: 121108 - DNA, 38 bp, Artificial Sequence
  primer
gtaaaacgacggccagttcaattgtgaatcagaacggg

SEQ ID NO: 121109 - DNA, 37 bp, Artificial Sequence
  primer
gtaaaacgacggccagtgtcagcaacactgccaaacc

SEQ ID NO: 121110 - DNA, 39 bp, Artificial Sequence
  primer
gtaaaacgacggccagttgtgagtgagtccagctctcag

SEQ ID NO: 121111 - DNA, 21 bp, Artificial Sequence
  primer
taaaggatgaaggaggagggc

SEQ ID NO: 121112 - DNA, 21 bp, Artificial Sequence
  primer
ccaacaagatctgcagcacac

SEQ ID NO: 121113 - DNA, 21 bp, Artificial Sequence
  primer
ttcaaagagaggtcaggagcc

SEQ ID NO: 121114 - DNA, 38 bp, Artificial Sequence
  primer
gtaaaacgacggccagtacgccttctcaaatctgcttc

SEQ ID NO: 121115 - DNA, 21 bp, Artificial Sequence
  primer
ctacacccaggagagtcaggg

SEQ ID NO: 121116 - DNA, 38 bp, Artificial Sequence
  primer
gtaaaacgacggccagtcacagacaggaaagccttgtg

SEQ ID NO: 121117 - DNA, 21 bp, Artificial Sequence
  primer
ggctcctcaggatgaagtcac

SEQ ID NO: 121118 - DNA, 22 bp, Artificial Sequence
  primer
tctaccactcctggtctatggg

SEQ ID NO: 121119 - DNA, 22 bp, Artificial Sequence
  primer
ctgtaccaaactgcatattgcc

SEQ ID NO: 121120 - DNA, 21 bp, Artificial Sequence
  primer
gggtagcttgctttctgcttc

SEQ ID NO: 121121 - DNA, 22 bp, Artificial Sequence
  primer
cacagaggacagtgcatgaaac

SEQ ID NO: 121122 - DNA, 22 bp, Artificial Sequence
  primer
tctaaacagatgccaatgcaaa

SEQ ID NO: 121123 - DNA, 21 bp, Artificial Sequence
  primer
gtaatgggtccatggaggttc

SEQ ID NO: 121124 - DNA, 39 bp, Artificial Sequence
  primer
gtaaaacgacggccagttttagagccaggtaggttggtc

SEQ ID NO: 121125 - DNA, 38 bp, Artificial Sequence
  primer
gtaaaacgacggccagtaaagaaggaggaagcagggac

SEQ ID NO: 121126 - DNA, 20 bp, Artificial Sequence
  primer
agcacctggcacagagtgag

SEQ ID NO: 121127 - DNA, 39 bp, Artificial Sequence
  primer
gtaaaacgacggccagtaatgctccctcaacatgaaatc

SEQ ID NO: 121128 - DNA, 38 bp, Artificial Sequence
  primer
gtaaaacgacggccagtgaaagaaaccgattctgaggc

SEQ ID NO: 121129 - DNA, 38 bp, Artificial Sequence
  primer
gtaaaacgacggccagttcagagaagacctgggtacgg

SEQ ID NO: 121130 - DNA, 38 bp, Artificial Sequence
  primer
gtaaaacgacggccagtatcaaacacgatcccaaactg

SEQ ID NO: 121131 - DNA, 21 bp, Artificial Sequence
  primer
tcactgaacctctccaaaccc

SEQ ID NO: 121132 - DNA, 21 bp, Artificial Sequence
  primer
gtgactgctgcaaagatgtcc

SEQ ID NO: 121133 - DNA, 21 bp, Artificial Sequence
  primer
tccagtgaaggagtactgggc

SEQ ID NO: 121134 - DNA, 18 bp, Artificial Sequence
  primer
cataccctgtgcgccctc

SEQ ID NO: 121135 - DNA, 20 bp, Artificial Sequence
  primer
tgctggagtcagacaggcac

SEQ ID NO: 121136 - DNA, 20 bp, Artificial Sequence
  primer
agtgtccagccaatgtccac

SEQ ID NO: 121137 - DNA, 35 bp, Artificial Sequence
  primer
gtaaaacgacggccagtgctcagggctcaggaagc

SEQ ID NO: 121138 - DNA, 21 bp, Artificial Sequence
  primer
tccctcccagttcagacattc

SEQ ID NO: 121139 - DNA, 21 bp, Artificial Sequence
  primer
acatcaccacttccctccaag

SEQ ID NO: 121140 - DNA, 21 bp, Artificial Sequence
  primer
atatgccaccaagaggaaacc

SEQ ID NO: 121141 - DNA, 21 bp, Artificial Sequence
  primer
tatgctaggaggcaggtaggc

SEQ ID NO: 121142 - DNA, 40 bp, Artificial Sequence
  primer
gtaaaacgacggccagtccaagcaaacttcaaactcattc

SEQ ID NO: 121143 - DNA, 21 bp, Artificial Sequence
  primer
gtcggtgtcactaagcatggc

SEQ ID NO: 121144 - DNA, 38 bp, Artificial Sequence
  primer
gtaaaacgacggccagttggtacgggaagagtgagcag

SEQ ID NO: 121145 - DNA, 35 bp, Artificial Sequence
  primer
gtaaaacgacggccagtggcagcatggagccgtag

SEQ ID NO: 121146 - DNA, 38 bp, Artificial Sequence
  primer
gtaaaacgacggccagtaccacacgtcaccctttatcc

SEQ ID NO: 121147 - DNA, 20 bp, Artificial Sequence
  primer
aacaactgggttcagctccc

SEQ ID NO: 121148 - DNA, 21 bp, Artificial Sequence
  primer
tctcctctccgtcaaacaagc

SEQ ID NO: 121149 - DNA, 21 bp, Artificial Sequence
  primer
agaaataggcgagcaaacagg

SEQ ID NO: 121150 - DNA, 38 bp, Artificial Sequence
  primer
gtaaaacgacggccagtgagatgatcaggcaagtgtgg

SEQ ID NO: 121151 - DNA, 21 bp, Artificial Sequence
  primer
tatcagcaaagtgcctgttga

SEQ ID NO: 121152 - DNA, 21 bp, Artificial Sequence
  primer
gtagtccagctgccatcttcc

SEQ ID NO: 121153 - DNA, 20 bp, Artificial Sequence
  primer
gccttcgcttacaagcactg

SEQ ID NO: 121154 - DNA, 38 bp, Artificial Sequence
  primer
gtaaaacgacggccagtttggcaacctaggcaaagaag

SEQ ID NO: 121155 - DNA, 38 bp, Artificial Sequence
  primer
gtaaaacgacggccagtaatggaagaataaaggcgcac

SEQ ID NO: 121156 - DNA, 21 bp, Artificial Sequence
  primer
actgcgtaggaccctgatttg

SEQ ID NO: 121157 - DNA, 38 bp, Artificial Sequence
  primer
gtaaaacgacggccagtacaatgtaaggcaaaccctcc

SEQ ID NO: 121158 - DNA, 22 bp, Artificial Sequence
  primer
gctcctagtgggtacaaatccc

SEQ ID NO: 121159 - DNA, 39 bp, Artificial Sequence
  primer
gtaaaacgacggccagtcatacagacaccatcaccacaa

SEQ ID NO: 121160 - DNA, 37 bp, Artificial Sequence
  primer
gtaaaacgacggccagtcaacaccacaggtccctcac

SEQ ID NO: 121161 - DNA, 38 bp, Artificial Sequence
  primer
gtaaaacgacggccagtggaagatacaaaccagtggca

SEQ ID NO: 121162 - DNA, 38 bp, Artificial Sequence
  primer
gtaaaacgacggccagtaaagacatcctcaaaccgagg

SEQ ID NO: 121163 - DNA, 21 bp, Artificial Sequence
  primer
atgatggtgggaaaggttgag

SEQ ID NO: 121164 - DNA, 42 bp, Artificial Sequence
  primer
gtaaaacgacggccagtccgtctgaagcatatgtactacttg

SEQ ID NO: 121165 - DNA, 23 bp, Artificial Sequence
  primer
gttaagtaccatgcccagacatc

SEQ ID NO: 121166 - DNA, 21 bp, Artificial Sequence
  primer
taaagcgggtgttcaggtagc

SEQ ID NO: 121167 - DNA, 38 bp, Artificial Sequence
  primer
gtaaaacgacggccagtcactgacactccagggacaag

SEQ ID NO: 121168 - DNA, 38 bp, Artificial Sequence
  primer
gtaaaacgacggccagtacccactatttgctgccactc

SEQ ID NO: 121169 - DNA, 19 bp, Artificial Sequence
  primer
aacagacgctgctgtgctc

SEQ ID NO: 121170 - DNA, 37 bp, Artificial Sequence
  primer
gtaaaacgacggccagtagagaatggaaatggcccag

SEQ ID NO: 121171 - DNA, 38 bp, Artificial Sequence
  primer
gtaaaacgacggccagttctgaacaccctttctcatgc

SEQ ID NO: 121172 - DNA, 39 bp, Artificial Sequence
  primer
gtaaaacgacggccagtcaataatggcaacttctgaggc

SEQ ID NO: 121173 - DNA, 21 bp, Artificial Sequence
  primer
tggagacagtagtgagccacg

SEQ ID NO: 121174 - DNA, 25 bp, Artificial Sequence
  primer
cagaagcaggatattctcttatccc

SEQ ID NO: 121175 - DNA, 38 bp, Artificial Sequence
  primer
gtaaaacgacggccagtcatgactgtatgtgtgctggc

SEQ ID NO: 121176 - DNA, 37 bp, Artificial Sequence
  primer
gtaaaacgacggccagtcccattgctgacatattccc

SEQ ID NO: 121177 - DNA, 39 bp, Artificial Sequence
  primer
gtaaaacgacggccagttcatctgattggtcatgcaaac

SEQ ID NO: 121178 - DNA, 21 bp, Artificial Sequence
  primer
ataattatcgtggccaaaccc

SEQ ID NO: 121179 - DNA, 21 bp, Artificial Sequence
  primer
gccaatcatttccacacctta

SEQ ID NO: 121180 - DNA, 38 bp, Artificial Sequence
  primer
gtaaaacgacggccagtttctgccatctctccactgtc

SEQ ID NO: 121181 - DNA, 21 bp, Artificial Sequence
  primer
ttgcatttccaaaccaaacac

SEQ ID NO: 121182 - DNA, 21 bp, Artificial Sequence
  primer
gggccaacatatccatttctc

SEQ ID NO: 121183 - DNA, 18 bp, Artificial Sequence
  primer
gaatggcatgaacccagg

SEQ ID NO: 121184 - DNA, 27 bp, Artificial Sequence
  primer
aaagtttaataccactgaaacagaacc

SEQ ID NO: 121185 - DNA, 18 bp, Artificial Sequence
  primer
aggtgtgagccaccatgc

SEQ ID NO: 121186 - DNA, 36 bp, Artificial Sequence
  primer
gtaaaacgacggccagtaaatacgtggctgcatggc

SEQ ID NO: 121187 - DNA, 20 bp, Artificial Sequence
  primer
cgtttgcaacccttggtatg

SEQ ID NO: 121188 - DNA, 38 bp, Artificial Sequence
  primer
gtaaaacgacggccagtcttgagtcctgggcaagtagg

SEQ ID NO: 121189 - DNA, 21 bp, Artificial Sequence
  primer
gtctccgctgctctctgaatc

SEQ ID NO: 121190 - DNA, 38 bp, Artificial Sequence
  primer
gtaaaacgacggccagtaggcttgttgagacacagtgc

SEQ ID NO: 121191 - DNA, 38 bp, Artificial Sequence
  primer
gtaaaacgacggccagtcagggatgggttgtggattag

SEQ ID NO: 121192 - DNA, 21 bp, Artificial Sequence
  primer
tgctggaactggttatggttg

SEQ ID NO: 121193 - DNA, 38 bp, Artificial Sequence
  primer
gtaaaacgacggccagtcatctgttgctgaaggagtcg

SEQ ID NO: 121194 - DNA, 21 bp, Artificial Sequence
  primer
aaagcattgaattctggtccg

SEQ ID NO: 121195 - DNA, 21 bp, Artificial Sequence
  primer
caaacggctactgcacagttc

SEQ ID NO: 121196 - DNA, 21 bp, Artificial Sequence
  primer
ctgaactggaagcctggagag

SEQ ID NO: 121197 - DNA, 21 bp, Artificial Sequence
  primer
gggacgtgacctgaatgtatg

SEQ ID NO: 121198 - DNA, 20 bp, Artificial Sequence
  primer
cctgacccatcctgaaacac

SEQ ID NO: 121199 - DNA, 38 bp, Artificial Sequence
  primer
gtaaaacgacggccagtccttagaaataccgcaggctc

SEQ ID NO: 121200 - DNA, 38 bp, Artificial Sequence
  primer
gtaaaacgacggccagtcaacacggaatacacctgctc

SEQ ID NO: 121201 - DNA, 38 bp, Artificial Sequence
  primer
gtaaaacgacggccagttgagtctggtgctggtttctg

SEQ ID NO: 121202 - DNA, 20 bp, Artificial Sequence
  primer
aggtagccagcaaatcctgc

SEQ ID NO: 121203 - DNA, 20 bp, Artificial Sequence
  primer
ctgaattgaccaggcattcg

SEQ ID NO: 121204 - DNA, 22 bp, Artificial Sequence
  primer
caccacttacaccactgcaaac

SEQ ID NO: 121205 - DNA, 37 bp, Artificial Sequence
  primer
gtaaaacgacggccagtagctctggtctcgggaagtg

SEQ ID NO: 121206 - DNA, 21 bp, Artificial Sequence
  primer
gcagatgtcctctgtgggaag

SEQ ID NO: 121207 - DNA, 39 bp, Artificial Sequence
  primer
gtaaaacgacggccagtcacagcctacaaattcctctgg

SEQ ID NO: 121208 - DNA, 21 bp, Artificial Sequence
  primer
ttccaaccagctgaagatgac

SEQ ID NO: 121209 - DNA, 22 bp, Artificial Sequence
  primer
gaaagacagtcagggcagtgtc

SEQ ID NO: 121210 - DNA, 21 bp, Artificial Sequence
  primer
tcacaacatgatcaagtgccc

SEQ ID NO: 121211 - DNA, 38 bp, Artificial Sequence
  primer
gtaaaacgacggccagtgggatagaccatttcactggg

SEQ ID NO: 121212 - DNA, 21 bp, Artificial Sequence
  primer
cactcccatcaaacacactgg

SEQ ID NO: 121213 - DNA, 23 bp, Artificial Sequence
  primer
ggtattgtctatgctttcgaggg

SEQ ID NO: 121214 - DNA, 21 bp, Artificial Sequence
  primer
tcaaaggccattgtttgtgtc

SEQ ID NO: 121215 - DNA, 21 bp, Artificial Sequence
  primer
cggttagaaaggcgacacttc

SEQ ID NO: 121216 - DNA, 38 bp, Artificial Sequence
  primer
gtaaaacgacggccagtgcctgaaacagctggaaacac

SEQ ID NO: 121217 - DNA, 21 bp, Artificial Sequence
  primer
ggttgagaacccatttccaag

SEQ ID NO: 121218 - DNA, 38 bp, Artificial Sequence
  primer
gtaaaacgacggccagttcccaagagcagcagataacc

SEQ ID NO: 121219 - DNA, 21 bp, Artificial Sequence
  primer
tcccactcagggacaattacc

SEQ ID NO: 121220 - DNA, 21 bp, Artificial Sequence
  primer
cagcaaggctcctcctacatc

SEQ ID NO: 121221 - DNA, 21 bp, Artificial Sequence
  primer
cacttaaatgcacaaggcagg

SEQ ID NO: 121222 - DNA, 38 bp, Artificial Sequence
  primer
gtaaaacgacggccagtaatgctttccactcgccttag

SEQ ID NO: 121223 - DNA, 20 bp, Artificial Sequence
  primer
aaccaaacacaacgagcagc

SEQ ID NO: 121224 - DNA, 38 bp, Artificial Sequence
  primer
gtaaaacgacggccagtacatccacgagacaagaaggg

SEQ ID NO: 121225 - DNA, 38 bp, Artificial Sequence
  primer
gtaaaacgacggccagttgggaaacgaatcacatcaag

SEQ ID NO: 121226 - DNA, 22 bp, Artificial Sequence
  primer
agaagctcattaagtccctccc

SEQ ID NO: 121227 - DNA, 38 bp, Artificial Sequence
  primer
gtaaaacgacggccagttgcattagtgcttcttgcacc

SEQ ID NO: 121228 - DNA, 21 bp, Artificial Sequence
  primer
tccaagtgtgcatctgacctc

SEQ ID NO: 121229 - DNA, 38 bp, Artificial Sequence
  primer
gtaaaacgacggccagttgacagaaagaagggagtggg

SEQ ID NO: 121230 - DNA, 23 bp, Artificial Sequence
  primer
tttcaattggtgtaagctgttcc

SEQ ID NO: 121231 - DNA, 21 bp, Artificial Sequence
  primer
gggcttctcgagactctcttc

SEQ ID NO: 121232 - DNA, 21 bp, Artificial Sequence
  primer
ctttgaacaagccaaacatgg

SEQ ID NO: 121233 - DNA, 20 bp, Artificial Sequence
  primer
tccagagctgcatggagaag

SEQ ID NO: 121234 - DNA, 21 bp, Artificial Sequence
  primer
agacagcagaaagtggctgac

SEQ ID NO: 121235 - DNA, 38 bp, Artificial Sequence
  primer
gtaaaacgacggccagtatcacagtgagctggatgcac

SEQ ID NO: 121236 - DNA, 38 bp, Artificial Sequence
  primer
gtaaaacgacggccagtgagcaggactggagctgaaac

SEQ ID NO: 121237 - DNA, 38 bp, Artificial Sequence
  primer
gtaaaacgacggccagtctgaaagggattcatgccaag

SEQ ID NO: 121238 - DNA, 21 bp, Artificial Sequence
  primer
gcacaacgatttgctgaactc

SEQ ID NO: 121239 - DNA, 19 bp, Artificial Sequence
  primer
gcagactcggcctgcatac

SEQ ID NO: 121240 - DNA, 22 bp, Artificial Sequence
  primer
tcttcgtttcaacagaaagcac

SEQ ID NO: 121241 - DNA, 38 bp, Artificial Sequence
  primer
gtaaaacgacggccagtttgttgatggactggaaggtg

SEQ ID NO: 121242 - DNA, 22 bp, Artificial Sequence
  primer
tccctcatacagaatggaaacc

SEQ ID NO: 121243 - DNA, 38 bp, Artificial Sequence
  primer
gtaaaacgacggccagtcattctcagacagcaagcagc

SEQ ID NO: 121244 - DNA, 21 bp, Artificial Sequence
  primer
acgcgtcctacataaaggcag

SEQ ID NO: 121245 - DNA, 21 bp, Artificial Sequence
  primer
ctgtaacacgtgacacgcacc

SEQ ID NO: 121246 - DNA, 21 bp, Artificial Sequence
  primer
tgtgaggaaagaacacgggtc

SEQ ID NO: 121247 - DNA, 21 bp, Artificial Sequence
  primer
ctgcttaggaccctctcctcc

SEQ ID NO: 121248 - DNA, 21 bp, Artificial Sequence
  primer
ccaggagacaacacttccctc

SEQ ID NO: 121249 - DNA, 21 bp, Artificial Sequence
  primer
aggtgaggctccctcagtatg

SEQ ID NO: 121250 - DNA, 38 bp, Artificial Sequence
  primer
gtaaaacgacggccagttgaatctcttgcgtgacatgg

SEQ ID NO: 121251 - DNA, 38 bp, Artificial Sequence
  primer
gtaaaacgacggccagtctcttctcccaaccactctcg

SEQ ID NO: 121252 - DNA, 19 bp, Artificial Sequence
  primer
ctctggcagcagaagggtc

SEQ ID NO: 121253 - DNA, 38 bp, Artificial Sequence
  primer
gtaaaacgacggccagtagaggtcaagtgggattgtgg

SEQ ID NO: 121254 - DNA, 21 bp, Artificial Sequence
  primer
tactggatcctctcaatgccc

SEQ ID NO: 121255 - DNA, 38 bp, Artificial Sequence
  primer
gtaaaacgacggccagtgtgcagtgcaagacctgagac

SEQ ID NO: 121256 - DNA, 20 bp, Artificial Sequence
  primer
ccggcaataccacgtctatg

SEQ ID NO: 121257 - DNA, 21 bp, Artificial Sequence
  primer
agggcataagtcttgtctgcc

SEQ ID NO: 121258 - DNA, 21 bp, Artificial Sequence
  primer
tgtcatcctgagtctgggaag

SEQ ID NO: 121259 - DNA, 38 bp, Artificial Sequence
  primer
gtaaaacgacggccagtagccagggaggcctgttatag

SEQ ID NO: 121260 - DNA, 21 bp, Artificial Sequence
  primer
aagtgtcacggccactctagg

SEQ ID NO: 121261 - DNA, 21 bp, Artificial Sequence
  primer
agaatggatgtgagcctttgc

SEQ ID NO: 121262 - DNA, 21 bp, Artificial Sequence
  primer
aagaactctgtgcgctgatcc

SEQ ID NO: 121263 - DNA, 38 bp, Artificial Sequence
  primer
gtaaaacgacggccagtgctcagagaagggctaaatgg

SEQ ID NO: 121264 - DNA, 20 bp, Artificial Sequence
  primer
tgggttccctaagggctatg

SEQ ID NO: 121265 - DNA, 38 bp, Artificial Sequence
  primer
gtaaaacgacggccagttgtggtgaatggaagaaccag

SEQ ID NO: 121266 - DNA, 38 bp, Artificial Sequence
  primer
gtaaaacgacggccagtacttcaagtcaagcacctccc

SEQ ID NO: 121267 - DNA, 22 bp, Artificial Sequence
  primer
tcttgtaaatagtgtgctggcg

SEQ ID NO: 121268 - DNA, 21 bp, Artificial Sequence
  primer
acagtgagtcttatcgtgggc

SEQ ID NO: 121269 - DNA, 22 bp, Artificial Sequence
  primer
aacactggcttagagaagcagg

SEQ ID NO: 121270 - DNA, 38 bp, Artificial Sequence
  primer
gtaaaacgacggccagtatcagaaggcgagatgtttgc

SEQ ID NO: 121271 - DNA, 21 bp, Artificial Sequence
  primer
atgggtgaaatggcaatgtag

SEQ ID NO: 121272 - DNA, 23 bp, Artificial Sequence
  primer
gagaaacgaggagaatagtcgtg

SEQ ID NO: 121273 - DNA, 40 bp, Artificial Sequence
  primer
gtaaaacgacggccagtcccagcccaaatactcttaaatg

SEQ ID NO: 121274 - DNA, 38 bp, Artificial Sequence
  primer
gtaaaacgacggccagtacagtgagtcttatcgtgggc

SEQ ID NO: 121275 - DNA, 38 bp, Artificial Sequence
  primer
gtaaaacgacggccagtctgactcacagccagaaatgg

SEQ ID NO: 121276 - DNA, 38 bp, Artificial Sequence
  primer
gtaaaacgacggccagttgccttgaagtgaccagaaac

SEQ ID NO: 121277 - DNA, 38 bp, Artificial Sequence
  primer
gtaaaacgacggccagtggcaaacaatgaaccaatacc

SEQ ID NO: 121278 - DNA, 37 bp, Artificial Sequence
  primer
gtaaaacgacggccagtagctgctgtgcccagtctac

SEQ ID NO: 121279 - DNA, 23 bp, Artificial Sequence
  primer
cggaattatcagcccttcaatag

SEQ ID NO: 121280 - DNA, 21 bp, Artificial Sequence
  primer
cagacaggtgctttggaaatg

SEQ ID NO: 121281 - DNA, 38 bp, Artificial Sequence
  primer
gtaaaacgacggccagtccctgagcttctttaattcgg

SEQ ID NO: 121282 - DNA, 21 bp, Artificial Sequence
  primer
tagttgggtcaaggagtgggt

SEQ ID NO: 121283 - DNA, 21 bp, Artificial Sequence
  primer
ggcaccaaatccaaatttcag

SEQ ID NO: 121284 - DNA, 21 bp, Artificial Sequence
  primer
aagagatcctcccacatcagc

SEQ ID NO: 121285 - DNA, 21 bp, Artificial Sequence
  primer
gtggcttactagggatggagc

SEQ ID NO: 121286 - DNA, 38 bp, Artificial Sequence
  primer
gtaaaacgacggccagtttgcagatgaagatggcaaac

SEQ ID NO: 121287 - DNA, 21 bp, Artificial Sequence
  primer
cgtctgcctttatcaagtccc

SEQ ID NO: 121288 - DNA, 38 bp, Artificial Sequence
  primer
gtaaaacgacggccagttaacaacaatgctcccagcac

SEQ ID NO: 121289 - DNA, 21 bp, Artificial Sequence
  primer
gtccaggactcctctggtttg

SEQ ID NO: 121290 - DNA, 21 bp, Artificial Sequence
  primer
agcactaatggatgctgttgg

SEQ ID NO: 121291 - DNA, 37 bp, Artificial Sequence
  primer
gtaaaacgacggccagttacagggatgagccacaacg

SEQ ID NO: 121292 - DNA, 38 bp, Artificial Sequence
  primer
gtaaaacgacggccagtgtcacatactgcctgtgtccc

SEQ ID NO: 121293 - DNA, 18 bp, Artificial Sequence
  primer
tggcggcctaggacattc

SEQ ID NO: 121294 - DNA, 21 bp, Artificial Sequence
  primer
aggtaacacagggtctggcac

SEQ ID NO: 121295 - DNA, 20 bp, Artificial Sequence
  primer
tgtgtgtgtgttggcagtcc

SEQ ID NO: 121296 - DNA, 38 bp, Artificial Sequence
  primer
gtaaaacgacggccagtattcaaagtggtccaggaagg

SEQ ID NO: 121297 - DNA, 21 bp, Artificial Sequence
  primer
tgaacttgggatgcatctacc

SEQ ID NO: 121298 - DNA, 21 bp, Artificial Sequence
  primer
tccatagtaagggtgcttggc

SEQ ID NO: 121299 - DNA, 21 bp, Artificial Sequence
  primer
gctggagagagaagcttagcg

SEQ ID NO: 121300 - DNA, 21 bp, Artificial Sequence
  primer
gtgaattcatctccctcagcc

SEQ ID NO: 121301 - DNA, 21 bp, Artificial Sequence
  primer
gtcaccaatgaccgtgaagtc

SEQ ID NO: 121302 - DNA, 38 bp, Artificial Sequence
  primer
gtaaaacgacggccagttgcaacacgagacagagcttc

SEQ ID NO: 121303 - DNA, 21 bp, Artificial Sequence
  primer
aagaagtatggtctgcccagg

SEQ ID NO: 121304 - DNA, 21 bp, Artificial Sequence
  primer
ctcacaacttcctgaagcagc

SEQ ID NO: 121305 - DNA, 21 bp, Artificial Sequence
  primer
tcctggctttgcacctagaag

SEQ ID NO: 121306 - DNA, 38 bp, Artificial Sequence
  primer
gtaaaacgacggccagtacaaagcgcacagtattccag

SEQ ID NO: 121307 - DNA, 38 bp, Artificial Sequence
  primer
gtaaaacgacggccagtgaagtggacaccttctctgcc

SEQ ID NO: 121308 - DNA, 21 bp, Artificial Sequence
  primer
gagggtcaaagctgcactagg

SEQ ID NO: 121309 - DNA, 38 bp, Artificial Sequence
  primer
gtaaaacgacggccagttttcccttcccagtctctcat

SEQ ID NO: 121310 - DNA, 21 bp, Artificial Sequence
  primer
gtccaggactcctctggtttg

SEQ ID NO: 121311 - DNA, 38 bp, Artificial Sequence
  primer
gtaaaacgacggccagtacctgcatctccactttgctc

SEQ ID NO: 121312 - DNA, 21 bp, Artificial Sequence
  primer
accaatctaagacccattccg

SEQ ID NO: 121313 - DNA, 40 bp, Artificial Sequence
  primer
gtaaaacgacggccagtaatcaactggcttacaggaactt

SEQ ID NO: 121314 - DNA, 23 bp, Artificial Sequence
  primer
tgtacacatatgcatgcacacac

SEQ ID NO: 121315 - DNA, 37 bp, Artificial Sequence
  primer
gtaaaacgacggccagtgagcacctgagccatgtacg

SEQ ID NO: 121316 - DNA, 40 bp, Artificial Sequence
  primer
gtaaaacgacggccagtcctgaaattaccactatgctccc

SEQ ID NO: 121317 - DNA, 25 bp, Artificial Sequence
  primer
ttggataatcctgtaaatcatgctc

SEQ ID NO: 121318 - DNA, 21 bp, Artificial Sequence
  primer
agaatacatggtccctcccac

SEQ ID NO: 121319 - DNA, 21 bp, Artificial Sequence
  primer
aacgagcccacaccttatcac

SEQ ID NO: 121320 - DNA, 35 bp, Artificial Sequence
  primer
gtaaaacgacggccagttcctcccacctctgcctc

SEQ ID NO: 121321 - DNA, 40 bp, Artificial Sequence
  primer
gtaaaacgacggccagttttctggtggctttattaactgg

SEQ ID NO: 121322 - DNA, 26 bp, Artificial Sequence
  primer
cataaatgaccagcagagaacataga

SEQ ID NO: 121323 - DNA, 37 bp, Artificial Sequence
  primer
gtaaaacgacggccagtaggctggtaacatgcactcc

SEQ ID NO: 121324 - DNA, 45 bp, Artificial Sequence
  primer
gtaaaacgacggccagttttgtaacttccctagactcaacataga

SEQ ID NO: 121325 - DNA, 38 bp, Artificial Sequence
  primer
gtaaaacgacggccagttttctgtggctcttcctctgc

SEQ ID NO: 121326 - DNA, 38 bp, Artificial Sequence
  primer
gtaaaacgacggccagtacaggagaagaaaggcaggag

SEQ ID NO: 121327 - DNA, 24 bp, Artificial Sequence
  primer
catcaaagccagaaacatgtaaac

SEQ ID NO: 121328 - DNA, 21 bp, Artificial Sequence
  primer
tttggcttgaatgcatttgtc

SEQ ID NO: 121329 - DNA, 38 bp, Artificial Sequence
  primer
gtaaaacgacggccagtgaggtggacttcatccaggag

SEQ ID NO: 121330 - DNA, 38 bp, Artificial Sequence
  primer
gtaaaacgacggccagtttgacaccacatgaccatcag

SEQ ID NO: 121331 - DNA, 38 bp, Artificial Sequence
  primer
gtaaaacgacggccagtcaagcaaggttgtggaatgtc

SEQ ID NO: 121332 - DNA, 24 bp, Artificial Sequence
  primer
ccctgttacagactagggaaataa

SEQ ID NO: 121333 - DNA, 39 bp, Artificial Sequence
  primer
gtaaaacgacggccagtgaatgaagggaggtggagaaag

SEQ ID NO: 121334 - DNA, 21 bp, Artificial Sequence
  primer
cacggtccctttaactccaag

SEQ ID NO: 121335 - DNA, 39 bp, Artificial Sequence
  primer
gtaaaacgacggccagttctcatcagatgtttgctctcg

SEQ ID NO: 121336 - DNA, 21 bp, Artificial Sequence
  primer
gtactgggaagaggtgggttg

SEQ ID NO: 121337 - DNA, 21 bp, Artificial Sequence
  primer
tgttgtatcgtggagtagggc

SEQ ID NO: 121338 - DNA, 38 bp, Artificial Sequence
  primer
gtaaaacgacggccagtactgtgtcccacaatgctcag

SEQ ID NO: 121339 - DNA, 38 bp, Artificial Sequence
  primer
gtaaaacgacggccagtggtgacaatgaacttgaaggg

SEQ ID NO: 121340 - DNA, 22 bp, Artificial Sequence
  primer
tgccattcagtcaataagcaac

SEQ ID NO: 121341 - DNA, 38 bp, Artificial Sequence
  primer
gtaaaacgacggccagtttcctggtttacagcctcagc

SEQ ID NO: 121342 - DNA, 21 bp, Artificial Sequence
  primer
tgccagtttgctgtctgtagc

SEQ ID NO: 121343 - DNA, 38 bp, Artificial Sequence
  primer
gtaaaacgacggccagtttctatgccgaggtacacacc

SEQ ID NO: 121344 - DNA, 38 bp, Artificial Sequence
  primer
gtaaaacgacggccagtcagccagctaacactgtttcg

SEQ ID NO: 121345 - DNA, 21 bp, Artificial Sequence
  primer
ttcttaaacacagagccaccc

SEQ ID NO: 121346 - DNA, 21 bp, Artificial Sequence
  primer
atgccaacctacacactgcac

SEQ ID NO: 121347 - DNA, 38 bp, Artificial Sequence
  primer
gtaaaacgacggccagtatgcaattccacaccctgtag

SEQ ID NO: 121348 - DNA, 21 bp, Artificial Sequence
  primer
agatgttgaaggcaaagccag

SEQ ID NO: 121349 - DNA, 21 bp, Artificial Sequence
  primer
tttctgaaatgtggatggctg

SEQ ID NO: 121350 - DNA, 38 bp, Artificial Sequence
  primer
gtaaaacgacggccagttgctgatctaaatttccaggc

SEQ ID NO: 121351 - DNA, 38 bp, Artificial Sequence
  primer
gtaaaacgacggccagtctggctgctggatcctctaag

SEQ ID NO: 121352 - DNA, 21 bp, Artificial Sequence
  primer
cccaacctgtgaggagttctg

SEQ ID NO: 121353 - DNA, 22 bp, Artificial Sequence
  primer
aacatgcatgatcagtggtgag

SEQ ID NO: 121354 - DNA, 21 bp, Artificial Sequence
  primer
accaattctccatcctcttgg

SEQ ID NO: 121355 - DNA, 23 bp, Artificial Sequence
  primer
caaagttaactcaccctggtacg

SEQ ID NO: 121356 - DNA, 21 bp, Artificial Sequence
  primer
tatgccatctgcaaagacgac

SEQ ID NO: 121357 - DNA, 38 bp, Artificial Sequence
  primer
gtaaaacgacggccagttctgcacccaactaatcatgg

SEQ ID NO: 121358 - DNA, 24 bp, Artificial Sequence
  primer
ttaccctctaaggagatgcgttac

SEQ ID NO: 121359 - DNA, 40 bp, Artificial Sequence
  primer
gtaaaacgacggccagtaagggatttgtactaggctccac

SEQ ID NO: 121360 - DNA, 41 bp, Artificial Sequence
  primer
gtaaaacgacggccagttgcacaggtgaagaatttatcatt

SEQ ID NO: 121361 - DNA, 22 bp, Artificial Sequence
  primer
aaacaacaggactgcagctttc

SEQ ID NO: 121362 - DNA, 21 bp, Artificial Sequence
  primer
catatgctgaggtgcaacagg

SEQ ID NO: 121363 - DNA, 21 bp, Artificial Sequence
  primer
tcacttccctttccttccttg

SEQ ID NO: 121364 - DNA, 41 bp, Artificial Sequence
  primer
gtaaaacgacggccagtaagggaaacaattccaaatttctg

SEQ ID NO: 121365 - DNA, 23 bp, Artificial Sequence
  primer
cccacaacatagctaatgcagac

SEQ ID NO: 121366 - DNA, 37 bp, Artificial Sequence
  primer
gtaaaacgacggccagttaagcaggccatggtgattc

SEQ ID NO: 121367 - DNA, 43 bp, Artificial Sequence
  primer
gtaaaacgacggccagttttcttcaaataagagagtcaggtcc

SEQ ID NO: 121368 - DNA, 39 bp, Artificial Sequence
  primer
gtaaaacgacggccagtcagcagctggattcctttattc

SEQ ID NO: 121369 - DNA, 40 bp, Artificial Sequence
  primer
gtaaaacgacggccagtttggagagaaacagtaatgtcgg

SEQ ID NO: 121370 - DNA, 21 bp, Artificial Sequence
  primer
tgcaacagaatggaagactgg

SEQ ID NO: 121371 - DNA, 38 bp, Artificial Sequence
  primer
gtaaaacgacggccagtgtgccagattgcttctcagac

SEQ ID NO: 121372 - DNA, 40 bp, Artificial Sequence
  primer
gtaaaacgacggccagtaacttctatggcttcaaacatgg

SEQ ID NO: 121373 - DNA, 21 bp, Artificial Sequence
  primer
tatggttaaggcaccaccacc

SEQ ID NO: 121374 - DNA, 23 bp, Artificial Sequence
  primer
cctaccaagtacaaagaggtggc

SEQ ID NO: 121375 - DNA, 20 bp, Artificial Sequence
  primer
accggaagtggtggtacaag

SEQ ID NO: 121376 - DNA, 21 bp, Artificial Sequence
  primer
attaaggtttcattgcctgcc

SEQ ID NO: 121377 - DNA, 19 bp, Artificial Sequence
  primer
gtaagtggaggctgcggtg

SEQ ID NO: 121378 - DNA, 39 bp, Artificial Sequence
  primer
gtaaaacgacggccagtcccatttctagcaactgtggac

SEQ ID NO: 121379 - DNA, 19 bp, Artificial Sequence
  primer
ggcagaggcgtctgatttc

SEQ ID NO: 121380 - DNA, 21 bp, Artificial Sequence
  primer
gacagaagaagaggcaaaccc

SEQ ID NO: 121381 - DNA, 38 bp, Artificial Sequence
  primer
gtaaaacgacggccagttcactttacaatgcctggtgc

SEQ ID NO: 121382 - DNA, 38 bp, Artificial Sequence
  primer
gtaaaacgacggccagtactgggcctggtatactgtgg

SEQ ID NO: 121383 - DNA, 38 bp, Artificial Sequence
  primer
gtaaaacgacggccagtcacaaggagagaagagttggc

SEQ ID NO: 121384 - DNA, 23 bp, Artificial Sequence
  primer
tcggtagagggttctaacaggtc

SEQ ID NO: 121385 - DNA, 21 bp, Artificial Sequence
  primer
tgaggatgaatctgggtgttg

SEQ ID NO: 121386 - DNA, 38 bp, Artificial Sequence
  primer
gtaaaacgacggccagttctaaccggaacacaaacgtg

SEQ ID NO: 121387 - DNA, 21 bp, Artificial Sequence
  primer
ggatgggacacacaacctaag

SEQ ID NO: 121388 - DNA, 21 bp, Artificial Sequence
  primer
tggagaactgcgggtactttc

SEQ ID NO: 121389 - DNA, 21 bp, Artificial Sequence
  primer
aagccatgagcatggaatagc

SEQ ID NO: 121390 - DNA, 37 bp, Artificial Sequence
  primer
gtaaaacgacggccagtgggtcagaaggaaagggctc

SEQ ID NO: 121391 - DNA, 21 bp, Artificial Sequence
  primer
ccacacacatcactggctacc

SEQ ID NO: 121392 - DNA, 21 bp, Artificial Sequence
  primer
atccatctgaggccaagacac

SEQ ID NO: 121393 - DNA, 21 bp, Artificial Sequence
  primer
aatctagggaactctcgtgcc

SEQ ID NO: 121394 - DNA, 20 bp, Artificial Sequence
  primer
gtttagcaggcaggctaggg

SEQ ID NO: 121395 - DNA, 38 bp, Artificial Sequence
  primer
gtaaaacgacggccagtcagcatctcagtcctacggtg

SEQ ID NO: 121396 - DNA, 38 bp, Artificial Sequence
  primer
gtaaaacgacggccagtttgaggcttgcggaaagttag

SEQ ID NO: 121397 - DNA, 39 bp, Artificial Sequence
  primer
gtaaaacgacggccagtttggaaataaatggaatttggg

SEQ ID NO: 121398 - DNA, 21 bp, Artificial Sequence
  primer
catgcaccagatgctactcag

SEQ ID NO: 121399 - DNA, 21 bp, Artificial Sequence
  primer
ctccaggacaagaggaagagg

SEQ ID NO: 121400 - DNA, 38 bp, Artificial Sequence
  primer
gtaaaacgacggccagtctggactccaaatcctccatc

SEQ ID NO: 121401 - DNA, 38 bp, Artificial Sequence
  primer
gtaaaacgacggccagttgcaaatccaagtttcttccc

SEQ ID NO: 121402 - DNA, 22 bp, Artificial Sequence
  primer
cgtgtcacaaacacaatgaacc

SEQ ID NO: 121403 - DNA, 44 bp, Artificial Sequence
  primer
gtaaaacgacggccagtcctagacttatcaaatcctgtctcaac

SEQ ID NO: 121404 - DNA, 40 bp, Artificial Sequence
  primer
gtaaaacgacggccagtggtaatcgccactaattccaaag

SEQ ID NO: 121405 - DNA, 21 bp, Artificial Sequence
  primer
ggtgatgctaaagcaaggagg

SEQ ID NO: 121406 - DNA, 21 bp, Artificial Sequence
  primer
atcaagcctacatgacttggg

SEQ ID NO: 121407 - DNA, 38 bp, Artificial Sequence
  primer
gtaaaacgacggccagttttgaggtcttgttaccaggg

SEQ ID NO: 121408 - DNA, 44 bp, Artificial Sequence
  primer
gtaaaacgacggccagtcacaagtttgttagacaagttgatttc

SEQ ID NO: 121409 - DNA, 23 bp, Artificial Sequence
  primer
tcagagttggaccctgatacaag

SEQ ID NO: 121410 - DNA, 21 bp, Artificial Sequence
  primer
gctggtgtttgacctctgaaa

SEQ ID NO: 121411 - DNA, 20 bp, Artificial Sequence
  primer
tatgcaaactccatgccctc

SEQ ID NO: 121412 - DNA, 39 bp, Artificial Sequence
  primer
gtaaaacgacggccagtcaggagacagttgctttcattg

SEQ ID NO: 121413 - DNA, 38 bp, Artificial Sequence
  primer
gtaaaacgacggccagtactgtttgcattctgtggctc

SEQ ID NO: 121414 - DNA, 38 bp, Artificial Sequence
  primer
gtaaaacgacggccagttggcaaaccaccttattcctc

SEQ ID NO: 121415 - DNA, 38 bp, Artificial Sequence
  primer
gtaaaacgacggccagtactggaacagacctgaggagg

SEQ ID NO: 121416 - DNA, 38 bp, Artificial Sequence
  primer
gtaaaacgacggccagtcatatccctggtgctttacgg

SEQ ID NO: 121417 - DNA, 40 bp, Artificial Sequence
  primer
gtaaaacgacggccagtcacataatttgtgcagggttaca

SEQ ID NO: 121418 - DNA, 42 bp, Artificial Sequence
  primer
gtaaaacgacggccagtaataataagctttccagctcacaaa

SEQ ID NO: 121419 - DNA, 21 bp, Artificial Sequence
  primer
aaaggcaagagggcataactc

SEQ ID NO: 121420 - DNA, 38 bp, Artificial Sequence
  primer
gtaaaacgacggccagtcagcacagacagatttcccag

SEQ ID NO: 121421 - DNA, 21 bp, Artificial Sequence
  primer
aaagtggcaaacattgaaggc

SEQ ID NO: 121422 - DNA, 22 bp, Artificial Sequence
  primer
acagacatcctgaaaccatgtg

SEQ ID NO: 121423 - DNA, 18 bp, Artificial Sequence
  primer
agtggtccacatgcctcg

SEQ ID NO: 121424 - DNA, 21 bp, Artificial Sequence
  primer
cagagaggcaatgctaagtgg

SEQ ID NO: 121425 - DNA, 21 bp, Artificial Sequence
  primer
caaccagaaagggtaagccac

SEQ ID NO: 121426 - DNA, 41 bp, Artificial Sequence
  primer
gtaaaacgacggccagtgaagaattgacattgctgctttag

SEQ ID NO: 121427 - DNA, 38 bp, Artificial Sequence
  primer
gtaaaacgacggccagtggacaagctcctgaatccaac

SEQ ID NO: 121428 - DNA, 20 bp, Artificial Sequence
  primer
tcacctctaccagcacccac

SEQ ID NO: 121429 - DNA, 21 bp, Artificial Sequence
  primer
caggtgggcaggacttcttac

SEQ ID NO: 121430 - DNA, 38 bp, Artificial Sequence
  primer
gtaaaacgacggccagtgtccttagagagggctgccac

SEQ ID NO: 121431 - DNA, 21 bp, Artificial Sequence
  primer
gaaatggtctcatgaccaggg

SEQ ID NO: 121432 - DNA, 22 bp, Artificial Sequence
  primer
gacgcttctgtaggaactgtcc

SEQ ID NO: 121433 - DNA, 21 bp, Artificial Sequence
  primer
gctgcctgggacaactacttc

SEQ ID NO: 121434 - DNA, 38 bp, Artificial Sequence
  primer
gtaaaacgacggccagtctcctgcagaggtgtgctatg

SEQ ID NO: 121435 - DNA, 21 bp, Artificial Sequence
  primer
tgtcatgcctcgtgcttctac

SEQ ID NO: 121436 - DNA, 37 bp, Artificial Sequence
  primer
gtaaaacgacggccagtttctggctgcatctaccagg

SEQ ID NO: 121437 - DNA, 21 bp, Artificial Sequence
  primer
aacatgagagtgagcagcagg

SEQ ID NO: 121438 - DNA, 21 bp, Artificial Sequence
  primer
gcctggattccttctgaaatg

SEQ ID NO: 121439 - DNA, 21 bp, Artificial Sequence
  primer
atgagggaagccacttggtag

SEQ ID NO: 121440 - DNA, 39 bp, Artificial Sequence
  primer
gtaaaacgacggccagttgagacgcaaagtttctcttcc

SEQ ID NO: 121441 - DNA, 19 bp, Artificial Sequence
  primer
aggcacactggaatctcgg

SEQ ID NO: 121442 - DNA, 21 bp, Artificial Sequence
  primer
cttctctgggtttctgggttc

SEQ ID NO: 121443 - DNA, 20 bp, Artificial Sequence
  primer
aacaccggatggactgactg

SEQ ID NO: 121444 - DNA, 21 bp, Artificial Sequence
  primer
gaatgatggacacagagctgg

SEQ ID NO: 121445 - DNA, 38 bp, Artificial Sequence
  primer
gtaaaacgacggccagtcctacttagccctgaggcgag

SEQ ID NO: 121446 - DNA, 20 bp, Artificial Sequence
  primer
acggactctgcagacaaagg

SEQ ID NO: 121447 - DNA, 21 bp, Artificial Sequence
  primer
agagtgagtgagcaaggagcc

SEQ ID NO: 121448 - DNA, 21 bp, Artificial Sequence
  primer
agctatgcaagaggttgaggc

SEQ ID NO: 121449 - DNA, 38 bp, Artificial Sequence
  primer
gtaaaacgacggccagtagggattgcatcctgtatgtg

SEQ ID NO: 121450 - DNA, 38 bp, Artificial Sequence
  primer
gtaaaacgacggccagtggacacaaaggaatcagaggc

SEQ ID NO: 121451 - DNA, 36 bp, Artificial Sequence
  primer
gtaaaacgacggccagtacgcctgacctcaccagac

SEQ ID NO: 121452 - DNA, 21 bp, Artificial Sequence
  primer
gcttcttcttcttcaccaggc

SEQ ID NO: 121453 - DNA, 38 bp, Artificial Sequence
  primer
gtaaaacgacggccagtcatccctcccatcttcaacac

SEQ ID NO: 121454 - DNA, 37 bp, Artificial Sequence
  primer
gtaaaacgacggccagtcggcagacagatgcctctac

SEQ ID NO: 121455 - DNA, 21 bp, Artificial Sequence
  primer
gaaaggagcccaccctatttc

SEQ ID NO: 121456 - DNA, 18 bp, Artificial Sequence
  primer
gtgtgggtttgctgctcc

SEQ ID NO: 121457 - DNA, 43 bp, Artificial Sequence
  primer
gtaaaacgacggccagttctactaactcttaagctgatgctgg

SEQ ID NO: 121458 - DNA, 22 bp, Artificial Sequence
  primer
cctgcaatctcacactctttcc

SEQ ID NO: 121459 - DNA, 21 bp, Artificial Sequence
  primer
gagcacagatcaccaggaaat

SEQ ID NO: 121460 - DNA, 21 bp, Artificial Sequence
  primer
cctacatgcaactcaaggacc

SEQ ID NO: 121461 - DNA, 35 bp, Artificial Sequence
  primer
gtaaaacgacggccagtactgtgcccggcctatgt

SEQ ID NO: 121462 - DNA, 20 bp, Artificial Sequence
  primer
cagcttccgaagagccagac

SEQ ID NO: 121463 - DNA, 21 bp, Artificial Sequence
  primer
gactagtccaaggccagttgc

SEQ ID NO: 121464 - DNA, 38 bp, Artificial Sequence
  primer
gtaaaacgacggccagttgtgtaagaaccaggcagcac

SEQ ID NO: 121465 - DNA, 38 bp, Artificial Sequence
  primer
gtaaaacgacggccagtccaaagtgtgctgaaccactg

SEQ ID NO: 121466 - DNA, 38 bp, Artificial Sequence
  primer
gtaaaacgacggccagtccacatagtcgaacaaatggg

SEQ ID NO: 121467 - DNA, 21 bp, Artificial Sequence
  primer
ttctgctggttagatgcaagg

SEQ ID NO: 121468 - DNA, 21 bp, Artificial Sequence
  primer
atggactacaggtcagacggg

SEQ ID NO: 121469 - DNA, 24 bp, Artificial Sequence
  primer
gaggtgtaagcccttgtatactcc

SEQ ID NO: 121470 - DNA, 38 bp, Artificial Sequence
  primer
gtaaaacgacggccagtaagaacgatgctggaggactg

SEQ ID NO: 121471 - DNA, 21 bp, Artificial Sequence
  primer
catgtgctgctttccatcatc

SEQ ID NO: 121472 - DNA, 21 bp, Artificial Sequence
  primer
cgagctaatcacaacactggg

SEQ ID NO: 121473 - DNA, 41 bp, Artificial Sequence
  primer
gtaaaacgacggccagtttccaaattcagatgtaagcacag

SEQ ID NO: 121474 - DNA, 21 bp, Artificial Sequence
  primer
ctctccactcacggaacattg

SEQ ID NO: 121475 - DNA, 21 bp, Artificial Sequence
  primer
gcgcaatggataatgtgtctg

SEQ ID NO: 121476 - DNA, 41 bp, Artificial Sequence
  primer
gtaaaacgacggccagttgtcataaagcttaacctgttccc

SEQ ID NO: 121477 - DNA, 21 bp, Artificial Sequence
  primer
tgcttggctcatggtaagaac

SEQ ID NO: 121478 - DNA, 25 bp, Artificial Sequence
  primer
tcagtggctacataaatactgtgga

SEQ ID NO: 121479 - DNA, 21 bp, Artificial Sequence
  primer
ttccaagaagaggattccgac

SEQ ID NO: 121480 - DNA, 38 bp, Artificial Sequence
  primer
gtaaaacgacggccagtattcggtccattatgaccctg

SEQ ID NO: 121481 - DNA, 26 bp, Artificial Sequence
  primer
aaatgtgagacagaacagaacaattt

SEQ ID NO: 121482 - DNA, 21 bp, Artificial Sequence
  primer
ccatatttggctccagcactc

SEQ ID NO: 121483 - DNA, 24 bp, Artificial Sequence
  primer
cccactatctttccaaagaaatcc

SEQ ID NO: 121484 - DNA, 21 bp, Artificial Sequence
  primer
cacctattgcttgagcagtgt

SEQ ID NO: 121485 - DNA, 38 bp, Artificial Sequence
  primer
gtaaaacgacggccagtctgtgatccacagagtgttgc

SEQ ID NO: 121486 - DNA, 20 bp, Artificial Sequence
  primer
tgctggtacataacctggcg

SEQ ID NO: 121487 - DNA, 37 bp, Artificial Sequence
  primer
gtaaaacgacggccagtgaaagagttacagggcgcag

SEQ ID NO: 121488 - DNA, 21 bp, Artificial Sequence
  primer
acctgcagacctaagtggagg

SEQ ID NO: 121489 - DNA, 21 bp, Artificial Sequence
  primer
ccacatcaatgtgcatcttcc

SEQ ID NO: 121490 - DNA, 41 bp, Artificial Sequence
  primer
gtaaaacgacggccagtgaagccaacttctctctaatgcag

SEQ ID NO: 121491 - DNA, 39 bp, Artificial Sequence
  primer
gtaaaacgacggccagtcaatccaaatttctctcccaag

SEQ ID NO: 121492 - DNA, 21 bp, Artificial Sequence
  primer
agcacccaggttcaagagatg

SEQ ID NO: 121493 - DNA, 38 bp, Artificial Sequence
  primer
gtaaaacgacggccagtccactcgtctgggtttatgag

SEQ ID NO: 121494 - DNA, 18 bp, Artificial Sequence
  primer
gcacagcgagagagctgg

SEQ ID NO: 121495 - DNA, 21 bp, Artificial Sequence
  primer
tttctctgttcctccacccac

SEQ ID NO: 121496 - DNA, 20 bp, Artificial Sequence
  primer
ttctctggcacccaataagg

SEQ ID NO: 121497 - DNA, 21 bp, Artificial Sequence
  primer
gtggttcctcaggttctcacc

SEQ ID NO: 121498 - DNA, 38 bp, Artificial Sequence
  primer
gtaaaacgacggccagtatctctgcatgtgtgtgtccg

SEQ ID NO: 121499 - DNA, 38 bp, Artificial Sequence
  primer
gtaaaacgacggccagtcaaccctgacaaagtctcagc

SEQ ID NO: 121500 - DNA, 38 bp, Artificial Sequence
  primer
gtaaaacgacggccagttgcccatcagtttgttctgtg

SEQ ID NO: 121501 - DNA, 21 bp, Artificial Sequence
  primer
agcagaatggttaggacaggg

SEQ ID NO: 121502 - DNA, 21 bp, Artificial Sequence
  primer
cactacgtggaacaggagctg

SEQ ID NO: 121503 - DNA, 38 bp, Artificial Sequence
  primer
gtaaaacgacggccagtggactctggctgaatcttccc

SEQ ID NO: 121504 - DNA, 20 bp, Artificial Sequence
  primer
agtggcatctcccaacacac

SEQ ID NO: 121505 - DNA, 21 bp, Artificial Sequence
  primer
ctcttggaccagagaagccag

SEQ ID NO: 121506 - DNA, 21 bp, Artificial Sequence
  primer
atatcacactcagaaccgggc

SEQ ID NO: 121507 - DNA, 38 bp, Artificial Sequence
  primer
gtaaaacgacggccagtcaaagtcagacaccttgcagc

SEQ ID NO: 121508 - DNA, 20 bp, Artificial Sequence
  primer
tcctgaccttgtgatccacc

SEQ ID NO: 121509 - DNA, 38 bp, Artificial Sequence
  primer
gtaaaacgacggccagtgtgaagaaccagaggagccag

SEQ ID NO: 121510 - DNA, 37 bp, Artificial Sequence
  primer
gtaaaacgacggccagtagaagattggctgaatgccc

SEQ ID NO: 121511 - DNA, 21 bp, Artificial Sequence
  primer
ggatcagtccttgaatccctg

SEQ ID NO: 121512 - DNA, 20 bp, Artificial Sequence
  primer
ctgaaagtgggcagaagcag

SEQ ID NO: 121513 - DNA, 38 bp, Artificial Sequence
  primer
gtaaaacgacggccagttctctccaatgactccttccc

SEQ ID NO: 121514 - DNA, 39 bp, Artificial Sequence
  primer
gtaaaacgacggccagtggagaccacacactctgaggag

SEQ ID NO: 121515 - DNA, 38 bp, Artificial Sequence
  primer
gtaaaacgacggccagtctgcttgtagtagacgcgcac

SEQ ID NO: 121516 - DNA, 21 bp, Artificial Sequence
  primer
cctctttcctctagggcacac

SEQ ID NO: 121517 - DNA, 38 bp, Artificial Sequence
  primer
gtaaaacgacggccagtctccagagtccaaggcttctc

SEQ ID NO: 121518 - DNA, 21 bp, Artificial Sequence
  primer
ccaggtaggttccaaagttgc

SEQ ID NO: 121519 - DNA, 21 bp, Artificial Sequence
  primer
ctctgagcctggtgtgagaag

SEQ ID NO: 121520 - DNA, 20 bp, Artificial Sequence
  primer
aggcaccgatatcctggaag

SEQ ID NO: 121521 - DNA, 39 bp, Artificial Sequence
  primer
gtaaaacgacggccagtcaagattccatgattccaaagc

SEQ ID NO: 121522 - DNA, 38 bp, Artificial Sequence
  primer
gtaaaacgacggccagtacaggaggagtcagtgctgtg

SEQ ID NO: 121523 - DNA, 38 bp, Artificial Sequence
  primer
gtaaaacgacggccagtctctctaaacacacccgagcc

SEQ ID NO: 121524 - DNA, 37 bp, Artificial Sequence
  primer
gtaaaacgacggccagtgtgcttcttcagatggctgg

SEQ ID NO: 121525 - DNA, 21 bp, Artificial Sequence
  primer
cactgtcgtgaatccacatcc

SEQ ID NO: 121526 - DNA, 38 bp, Artificial Sequence
  primer
gtaaaacgacggccagtatgaggaaatggaggttcctg

SEQ ID NO: 121527 - DNA, 21 bp, Artificial Sequence
  primer
agagacttggaccaggctgtg

SEQ ID NO: 121528 - DNA, 38 bp, Artificial Sequence
  primer
gtaaaacgacggccagtgaagtccactcgctgcttctc

SEQ ID NO: 121529 - DNA, 21 bp, Artificial Sequence
  primer
ggaaggtgggcacaggtatag

SEQ ID NO: 121530 - DNA, 38 bp, Artificial Sequence
  primer
gtaaaacgacggccagtgtcagacaccttgcagaccag

SEQ ID NO: 121531 - DNA, 21 bp, Artificial Sequence
  primer
gttctgcctcctgaagcactg

SEQ ID NO: 121532 - DNA, 21 bp, Artificial Sequence
  primer
ctaaactgtcctctgcccagc

SEQ ID NO: 121533 - DNA, 20 bp, Artificial Sequence
  primer
gtggccactctaccgaagtg

SEQ ID NO: 121534 - DNA, 21 bp, Artificial Sequence
  primer
caaagagaggagcattgaggg

SEQ ID NO: 121535 - DNA, 38 bp, Artificial Sequence
  primer
gtaaaacgacggccagtggtcatctcctcagttcaggc

SEQ ID NO: 121536 - DNA, 21 bp, Artificial Sequence
  primer
aattgctcgaaatggtgtcag

SEQ ID NO: 121537 - DNA, 22 bp, Artificial Sequence
  primer
tccattggacacaaatgtcaag

SEQ ID NO: 121538 - DNA, 21 bp, Artificial Sequence
  primer
accgtgtctggaaacatagcc

SEQ ID NO: 121539 - DNA, 21 bp, Artificial Sequence
  primer
tcctgccaagtgagttgagac

SEQ ID NO: 121540 - DNA, 38 bp, Artificial Sequence
  primer
gtaaaacgacggccagtaaagctttcaatttgcacacg

SEQ ID NO: 121541 - DNA, 35 bp, Artificial Sequence
  primer
gtaaaacgacggccagttttccttccgcccagttt

SEQ ID NO: 121542 - DNA, 38 bp, Artificial Sequence
  primer
gtaaaacgacggccagtgcagtggcatctttgatgttg

SEQ ID NO: 121543 - DNA, 37 bp, Artificial Sequence
  primer
gtaaaacgacggccagtgcaaattgcaatgtcccaag

SEQ ID NO: 121544 - DNA, 41 bp, Artificial Sequence
  primer
gtaaaacgacggccagtggaggagaaagagaggacctaaac

SEQ ID NO: 121545 - DNA, 38 bp, Artificial Sequence
  primer
gtaaaacgacggccagtatgcagaaccatgaatttccc

SEQ ID NO: 121546 - DNA, 39 bp, Artificial Sequence
  primer
gtaaaacgacggccagtttgcctttgatcatgaaatcag

SEQ ID NO: 121547 - DNA, 23 bp, Artificial Sequence
  primer
ctgctctactgtcaaagaaaggc

SEQ ID NO: 121548 - DNA, 20 bp, Artificial Sequence
  primer
gcttggcacaatattggagg

SEQ ID NO: 121549 - DNA, 39 bp, Artificial Sequence
  primer
gtaaaacgacggccagtggaaagcataattgacaacacg

SEQ ID NO: 121550 - DNA, 21 bp, Artificial Sequence
  primer
tataaaccaggagccacccag

SEQ ID NO: 121551 - DNA, 38 bp, Artificial Sequence
  primer
gtaaaacgacggccagttggtggaatacaagcttcaaa

SEQ ID NO: 121552 - DNA, 39 bp, Artificial Sequence
  primer
gtaaaacgacggccagtcaggcggtagtcagtacctcag

SEQ ID NO: 121553 - DNA, 38 bp, Artificial Sequence
  primer
gtaaaacgacggccagtttgtctgtctgcaggatgatg

SEQ ID NO: 121554 - DNA, 21 bp, Artificial Sequence
  primer
ttacaaacttggacagacccg

SEQ ID NO: 121555 - DNA, 21 bp, Artificial Sequence
  primer
aagtctgtgcctccaccagtc

SEQ ID NO: 121556 - DNA, 38 bp, Artificial Sequence
  primer
gtaaaacgacggccagtctcatcagcagcaatggtgtc

SEQ ID NO: 121557 - DNA, 21 bp, Artificial Sequence
  primer
ctcttaccttggcattctccg

SEQ ID NO: 121558 - DNA, 21 bp, Artificial Sequence
  primer
tcttagctttgccacctggag

SEQ ID NO: 121559 - DNA, 38 bp, Artificial Sequence
  primer
gtaaaacgacggccagttatcccaggagaagacctggc

SEQ ID NO: 121560 - DNA, 38 bp, Artificial Sequence
  primer
gtaaaacgacggccagttcccaggcttgattgattcta

SEQ ID NO: 121561 - DNA, 38 bp, Artificial Sequence
  primer
gtaaaacgacggccagtggagtcgaggaaagaaggaag

SEQ ID NO: 121562 - DNA, 24 bp, Artificial Sequence
  primer
tccttagatttcactgtaatggga

SEQ ID NO: 121563 - DNA, 21 bp, Artificial Sequence
  primer
tgccaagtttatgacgcaatc

SEQ ID NO: 121564 - DNA, 21 bp, Artificial Sequence
  primer
atctcaccatccaaatcaccc

SEQ ID NO: 121565 - DNA, 26 bp, Artificial Sequence
  primer
tctgatttcagattgcattaagtttc

SEQ ID NO: 121566 - DNA, 38 bp, Artificial Sequence
  primer
gtaaaacgacggccagtttgtcctgcactgatttcctc

SEQ ID NO: 121567 - DNA, 38 bp, Artificial Sequence
  primer
gtaaaacgacggccagtccgaacacaacaaacacaagg

SEQ ID NO: 121568 - DNA, 21 bp, Artificial Sequence
  primer
ggatgcaggaatatgaggagg

SEQ ID NO: 121569 - DNA, 23 bp, Artificial Sequence
  primer
tgtaggccatttaattcttgtcc

SEQ ID NO: 121570 - DNA, 20 bp, Artificial Sequence
  primer
ggttgcagagagccatgaag

SEQ ID NO: 121571 - DNA, 19 bp, Artificial Sequence
  primer
cagcacaacaaggcaggtg

SEQ ID NO: 121572 - DNA, 21 bp, Artificial Sequence
  primer
taatttcagagggcgaagacg

SEQ ID NO: 121573 - DNA, 36 bp, Artificial Sequence
  primer
gtaaaacgacggccagtcgctgagacctgaactccc

SEQ ID NO: 121574 - DNA, 41 bp, Artificial Sequence
  primer
gtaaaacgacggccagtcatagcacctcctgtcttaacaac

SEQ ID NO: 121575 - DNA, 38 bp, Artificial Sequence
  primer
gtaaaacgacggccagtctgtaaagctttcatcggcag

SEQ ID NO: 121576 - DNA, 38 bp, Artificial Sequence
  primer
gtaaaacgacggccagttcttcatatcctgccttgcac

SEQ ID NO: 121577 - DNA, 38 bp, Artificial Sequence
  primer
gtaaaacgacggccagttaaatctttcacggttgccag

SEQ ID NO: 121578 - DNA, 25 bp, Artificial Sequence
  primer
tttcagtgcttattcaaggagattg

SEQ ID NO: 121579 - DNA, 37 bp, Artificial Sequence
  primer
gtaaaacgacggccagttcagtcaacttggccgtcag

SEQ ID NO: 121580 - DNA, 23 bp, Artificial Sequence
  primer
gagctccctgtacacttctagcc

SEQ ID NO: 121581 - DNA, 37 bp, Artificial Sequence
  primer
gtaaaacgacggccagtcccagggagggtattgatcc

SEQ ID NO: 121582 - DNA, 20 bp, Artificial Sequence
  primer
ctcaacagccaaatggtcag

SEQ ID NO: 121583 - DNA, 40 bp, Artificial Sequence
  primer
gtaaaacgacggccagttcacttgttaggattcaccttgg

SEQ ID NO: 121584 - DNA, 21 bp, Artificial Sequence
  primer
gaaatacccaagcccgtattc

SEQ ID NO: 121585 - DNA, 22 bp, Artificial Sequence
  primer
catatcactttgaatgcaagcc

SEQ ID NO: 121586 - DNA, 22 bp, Artificial Sequence
  primer
cattgaattcatagcaaatggg

SEQ ID NO: 121587 - DNA, 24 bp, Artificial Sequence
  primer
gggcatataatttggatttgtgtg

SEQ ID NO: 121588 - DNA, 38 bp, Artificial Sequence
  primer
gtaaaacgacggccagtttgactttgttgcaggaatgc

SEQ ID NO: 121589 - DNA, 26 bp, Artificial Sequence
  primer
tcctgcttaaaggatatttcaacaac

SEQ ID NO: 121590 - DNA, 47 bp, Artificial Sequence
  primer
gtaaaacgacggccagttcacatatttcattcattgtaagagagtag

SEQ ID NO: 121591 - DNA, 21 bp, Artificial Sequence
  primer
tgatgaggcttctttgagagc

SEQ ID NO: 121592 - DNA, 21 bp, Artificial Sequence
  primer
tacaaattctgtggctgaggc

SEQ ID NO: 121593 - DNA, 18 bp, Artificial Sequence
  primer
acgagctggcttgtgcag

SEQ ID NO: 121594 - DNA, 21 bp, Artificial Sequence
  primer
tagcatttacagcctggaccc

SEQ ID NO: 121595 - DNA, 20 bp, Artificial Sequence
  primer
aaccaaagctatgcaagccc

SEQ ID NO: 121596 - DNA, 37 bp, Artificial Sequence
  primer
gtaaaacgacggccagttttgctggtagcctgctttg

SEQ ID NO: 121597 - DNA, 38 bp, Artificial Sequence
  primer
gtaaaacgacggccagttctactgaattgcgcttctgg

SEQ ID NO: 121598 - DNA, 38 bp, Artificial Sequence
  primer
gtaaaacgacggccagttttgcagacacggaaataaca

SEQ ID NO: 121599 - DNA, 38 bp, Artificial Sequence
  primer
gtaaaacgacggccagttggaagaatcaagctctgtgc

SEQ ID NO: 121600 - DNA, 22 bp, Artificial Sequence
  primer
gaagtagctccaaattgttggc

SEQ ID NO: 121601 - DNA, 21 bp, Artificial Sequence
  primer
ggtgcaaatgatcacctcaat

SEQ ID NO: 121602 - DNA, 26 bp, Artificial Sequence
  primer
tcttgaaggaatgacacattattgac

SEQ ID NO: 121603 - DNA, 38 bp, Artificial Sequence
  primer
gtaaaacgacggccagtggactttgttaatgccaatgc

SEQ ID NO: 121604 - DNA, 21 bp, Artificial Sequence
  primer
tacagcctcactgcttccaac

SEQ ID NO: 121605 - DNA, 28 bp, Artificial Sequence
  primer
ttgaggtgataacataaaggaagaattt

SEQ ID NO: 121606 - DNA, 37 bp, Artificial Sequence
  primer
gtaaaacgacggccagtgggcatcctccatacctcag

SEQ ID NO: 121607 - DNA, 23 bp, Artificial Sequence
  primer
cattattaggtcctgctttcgtg

SEQ ID NO: 121608 - DNA, 41 bp, Artificial Sequence
  primer
gtaaaacgacggccagttgagcctttacctacatgttccag

SEQ ID NO: 121609 - DNA, 19 bp, Artificial Sequence
  primer
caatttgccattgtggtgg

SEQ ID NO: 121610 - DNA, 23 bp, Artificial Sequence
  primer
gcctggtacgcagtaagaacttg

SEQ ID NO: 121611 - DNA, 21 bp, Artificial Sequence
  primer
aaggacccaggacatcacttg

SEQ ID NO: 121612 - DNA, 18 bp, Artificial Sequence
  primer
aggaagttgagccgcagg

SEQ ID NO: 121613 - DNA, 21 bp, Artificial Sequence
  primer
gccagggttggttctgtaatc

SEQ ID NO: 121614 - DNA, 22 bp, Artificial Sequence
  primer
catggcagggcacttcttatag

SEQ ID NO: 121615 - DNA, 20 bp, Artificial Sequence
  primer
ctgtgtgggtcactcaggtg

SEQ ID NO: 121616 - DNA, 37 bp, Artificial Sequence
  primer
gtaaaacgacggccagtcaccagcagagaactggctc

SEQ ID NO: 121617 - DNA, 19 bp, Artificial Sequence
  primer
taaaggcccacagcacgtc

SEQ ID NO: 121618 - DNA, 38 bp, Artificial Sequence
  primer
gtaaaacgacggccagttagctctgcatctccttgtcc

SEQ ID NO: 121619 - DNA, 21 bp, Artificial Sequence
  primer
gcctgcactagctctctcctc

SEQ ID NO: 121620 - DNA, 21 bp, Artificial Sequence
  primer
gtgtttgtaagtgagccagcc

SEQ ID NO: 121621 - DNA, 21 bp, Artificial Sequence
  primer
tctgtgacaccctggaatctg

SEQ ID NO: 121622 - DNA, 35 bp, Artificial Sequence
  primer
gtaaaacgacggccagtgtcacacgctccctctgc

SEQ ID NO: 121623 - DNA, 21 bp, Artificial Sequence
  primer
ggacctgaaccaagaggacag

SEQ ID NO: 121624 - DNA, 21 bp, Artificial Sequence
  primer
gacctcctccctatacctgcc

SEQ ID NO: 121625 - DNA, 21 bp, Artificial Sequence
  primer
gctacttgcagaatggttggg

SEQ ID NO: 121626 - DNA, 37 bp, Artificial Sequence
  primer
gtaaaacgacggccagttccacagagctgatgacctg

SEQ ID NO: 121627 - DNA, 21 bp, Artificial Sequence
  primer
tagtgtcagggccaaactgtc

SEQ ID NO: 121628 - DNA, 21 bp, Artificial Sequence
  primer
catggatctggacctgtagcc

SEQ ID NO: 121629 - DNA, 37 bp, Artificial Sequence
  primer
gtaaaacgacggccagtgaagccttcagctcctccag

SEQ ID NO: 121630 - DNA, 19 bp, Artificial Sequence
  primer
cagtttcgggcgctaagag

SEQ ID NO: 121631 - DNA, 39 bp, Artificial Sequence
  primer
gtaaaacgacggccagtccacaggtactgctctgggtag

SEQ ID NO: 121632 - DNA, 21 bp, Artificial Sequence
  primer
tttaccttcatcagccttccc

SEQ ID NO: 121633 - DNA, 21 bp, Artificial Sequence
  primer
agcagaggctccaaagcttac

SEQ ID NO: 121634 - DNA, 21 bp, Artificial Sequence
  primer
gcctagcactaggaatgggag

SEQ ID NO: 121635 - DNA, 38 bp, Artificial Sequence
  primer
gtaaaacgacggccagttgatgtcttctcttccttgcc

SEQ ID NO: 121636 - DNA, 21 bp, Artificial Sequence
  primer
cagctgtgtccctgcctagag

SEQ ID NO: 121637 - DNA, 38 bp, Artificial Sequence
  primer
gtaaaacgacggccagtctctgtcaccagaatcctccc

SEQ ID NO: 121638 - DNA, 21 bp, Artificial Sequence
  primer
ggaatccagttggagatcagc

SEQ ID NO: 121639 - DNA, 38 bp, Artificial Sequence
  primer
gtaaaacgacggccagttcacaccctatctgatccacg

SEQ ID NO: 121640 - DNA, 38 bp, Artificial Sequence
  primer
gtaaaacgacggccagtgagagaacttgccactgggac

SEQ ID NO: 121641 - DNA, 21 bp, Artificial Sequence
  primer
agagaccatctagggtggtgg

SEQ ID NO: 121642 - DNA, 21 bp, Artificial Sequence
  primer
ttcctgattggtaggttgtgc

SEQ ID NO: 121643 - DNA, 38 bp, Artificial Sequence
  primer
gtaaaacgacggccagttcacagttcccagccatgtag

SEQ ID NO: 121644 - DNA, 21 bp, Artificial Sequence
  primer
acatccatgctaagggtgtcc

SEQ ID NO: 121645 - DNA, 21 bp, Artificial Sequence
  primer
atgatcatggtcagaggctgc

SEQ ID NO: 121646 - DNA, 22 bp, Artificial Sequence
  primer
aggccagaaataggactcacac

SEQ ID NO: 121647 - DNA, 21 bp, Artificial Sequence
  primer
agctgagaagccagtctctcc

SEQ ID NO: 121648 - DNA, 21 bp, Artificial Sequence
  primer
atggcttaagaggtcactggg

SEQ ID NO: 121649 - DNA, 38 bp, Artificial Sequence
  primer
gtaaaacgacggccagtctgcagtggatagagcaccag

SEQ ID NO: 121650 - DNA, 38 bp, Artificial Sequence
  primer
gtaaaacgacggccagtctcctcctggcacagtcaatc

SEQ ID NO: 121651 - DNA, 21 bp, Artificial Sequence
  primer
gttgtcatggtaactggctcc

SEQ ID NO: 121652 - DNA, 38 bp, Artificial Sequence
  primer
gtaaaacgacggccagtgacagggtttcctggaagatg

SEQ ID NO: 121653 - DNA, 38 bp, Artificial Sequence
  primer
gtaaaacgacggccagtctagagtgcctcatggtcagc

SEQ ID NO: 121654 - DNA, 38 bp, Artificial Sequence
  primer
gtaaaacgacggccagtaaagactggctgtaaccggac

SEQ ID NO: 121655 - DNA, 43 bp, Artificial Sequence
  primer
gtaaaacgacggccagttcactccatagatgtgaaggagtctt

SEQ ID NO: 121656 - DNA, 38 bp, Artificial Sequence
  primer
gtaaaacgacggccagtaggtctcacagtgggaaggag

SEQ ID NO: 121657 - DNA, 21 bp, Artificial Sequence
  primer
gagggctgacatctagaaggg

SEQ ID NO: 121658 - DNA, 21 bp, Artificial Sequence
  primer
ctcggttcaccagcactgtag

SEQ ID NO: 121659 - DNA, 21 bp, Artificial Sequence
  primer
atggcttaagaggtcactggg

SEQ ID NO: 121660 - DNA, 38 bp, Artificial Sequence
  primer
gtaaaacgacggccagtgtcccacatcctaccttctgc

SEQ ID NO: 121661 - DNA, 38 bp, Artificial Sequence
  primer
gtaaaacgacggccagtaagggaatggaaagtgacagc

SEQ ID NO: 121662 - DNA, 21 bp, Artificial Sequence
  primer
gtgaaagtgtcttgcagggag

SEQ ID NO: 121663 - DNA, 20 bp, Artificial Sequence
  primer
ctctgggagactggcacaag

SEQ ID NO: 121664 - DNA, 21 bp, Artificial Sequence
  primer
aggaagagcatttgcctgaag

SEQ ID NO: 121665 - DNA, 21 bp, Artificial Sequence
  primer
attcctcaccctccagatcac

SEQ ID NO: 121666 - DNA, 38 bp, Artificial Sequence; identical to SEQ ID NO: 121649
  primer

SEQ ID NO: 121667 - DNA, 23 bp, Artificial Sequence
  primer
tctgaaagtgtttcttggctctg

SEQ ID NO: 121668 - DNA, 20 bp, Artificial Sequence
  primer
acgttcgtcccgagtctagc

SEQ ID NO: 121669 - DNA, 20 bp, Artificial Sequence
  primer
gaggtgcttcagagggtcac

SEQ ID NO: 121670 - DNA, 21 bp, Artificial Sequence
  primer
gtagaagccagccttggaaag

SEQ ID NO: 121671 - DNA, 21 bp, Artificial Sequence
  primer
gctcccagacctcctagtcag

SEQ ID NO: 121672 - DNA, 21 bp, Artificial Sequence
  primer
gagcgcaacatctaacttccc

SEQ ID NO: 121673 - DNA, 19 bp, Artificial Sequence
  primer
tagcaggtcctgggacacc

SEQ ID NO: 121674 - DNA, 18 bp, Artificial Sequence
  primer
accctcaggtgggtcctg

SEQ ID NO: 121675 - DNA, 21 bp, Artificial Sequence
  primer
cgaagacaagcccagctgtag

SEQ ID NO: 121676 - DNA, 36 bp, Artificial Sequence
  primer
gtaaaacgacggccagtgtctgagggaagtggtggc

SEQ ID NO: 121677 - DNA, 21 bp, Artificial Sequence
  primer
gaaatgccacttgactggaag

SEQ ID NO: 121678 - DNA, 22 bp, Artificial Sequence
  primer
cagggcacaagctatgactcac

SEQ ID NO: 121679 - DNA, 21 bp, Artificial Sequence
  primer
cttatggctatgaaggccctg

SEQ ID NO: 121680 - DNA, 19 bp, Artificial Sequence
  primer
gcccttcaccctgtgactc

SEQ ID NO: 121681 - DNA, 37 bp, Artificial Sequence
  primer
gtaaaacgacggccagtcagggaaaccctgagtgagc

SEQ ID NO: 121682 - DNA, 21 bp, Artificial Sequence
  primer
tgggaagaagagaaggacctg

SEQ ID NO: 121683 - DNA, 21 bp, Artificial Sequence
  primer
taggatcagtccctttcctcg

SEQ ID NO: 121684 - DNA, 21 bp, Artificial Sequence
  primer
tccaagagtccgaaagtccag

SEQ ID NO: 121685 - DNA, 21 bp, Artificial Sequence
  primer
gccagactccatctctttccc

SEQ ID NO: 121686 - DNA, 37 bp, Artificial Sequence
  primer
gtaaaacgacggccagtagtggcacacagaaagcagg

SEQ ID NO: 121687 - DNA, 38 bp, Artificial Sequence
  primer
gtaaaacgacggccagtcagaggcctcgcaactacatc

SEQ ID NO: 121688 - DNA, 21 bp, Artificial Sequence
  primer
agagcaagcctccatttcaac

SEQ ID NO: 121689 - DNA, 37 bp, Artificial Sequence
  primer
gtaaaacgacggccagtccagggacaaagggaagaag

SEQ ID NO: 121690 - DNA, 20 bp, Artificial Sequence
  primer
ggtacccaacttcacagccc

SEQ ID NO: 121691 - DNA, 38 bp, Artificial Sequence
  primer
gtaaaacgacggccagtggcagagctggaattcaaatg

SEQ ID NO: 121692 - DNA, 20 bp, Artificial Sequence
  primer
atgggactttggagacctgg

SEQ ID NO: 121693 - DNA, 21 bp, Artificial Sequence
  primer
aaaggcttgtcctgtagcacc

SEQ ID NO: 121694 - DNA, 35 bp, Artificial Sequence
  primer
gtaaaacgacggccagttgatctgcccacctctgc

SEQ ID NO: 121695 - DNA, 20 bp, Artificial Sequence
  primer
acctcgccaaactcaccttc

SEQ ID NO: 121696 - DNA, 38 bp, Artificial Sequence
  primer
gtaaaacgacggccagtcctggcttcttaacccaagtg

SEQ ID NO: 121697 - DNA, 36 bp, Artificial Sequence
  primer
gtaaaacgacggccagtctcccacctttccaacctg

SEQ ID NO: 121698 - DNA, 38 bp, Artificial Sequence
  primer
gtaaaacgacggccagtcagcagtgatgactctctggg

SEQ ID NO: 121699 - DNA, 21 bp, Artificial Sequence
  primer
caatgaacggacacttctggg

SEQ ID NO: 121700 - DNA, 38 bp, Artificial Sequence
  primer
gtaaaacgacggccagtagtgcaagaagacagcattgg

SEQ ID NO: 121701 - DNA, 38 bp, Artificial Sequence
  primer
gtaaaacgacggccagtatcctgtctctccaaattgcc

SEQ ID NO: 121702 - DNA, 39 bp, Artificial Sequence
  primer
gtaaaacgacggccagttcttcattatcctcaccatgcc

SEQ ID NO: 121703 - DNA, 21 bp, Artificial Sequence
  primer
catgaattccactctccaggg

SEQ ID NO: 121704 - DNA, 38 bp, Artificial Sequence
  primer
gtaaaacgacggccagtaggagggaaagctctcgtctg

SEQ ID NO: 121705 - DNA, 38 bp, Artificial Sequence
  primer
gtaaaacgacggccagtccctactccatcctcctctgg

SEQ ID NO: 121706 - DNA, 37 bp, Artificial Sequence
  primer
gtaaaacgacggccagtttcagagaggagcccaaagg

SEQ ID NO: 121707 - DNA, 21 bp, Artificial Sequence
  primer
gtcactccaaatgcaaagagc

SEQ ID NO: 121708 - DNA, 21 bp, Artificial Sequence
  primer
aagagctcaccttcatggctg

SEQ ID NO: 121709 - DNA, 38 bp, Artificial Sequence
  primer
gtaaaacgacggccagtggctggagatcaggagtaggg

SEQ ID NO: 121710 - DNA, 19 bp, Artificial Sequence
  primer
actgtgagctcctgccagc

SEQ ID NO: 121711 - DNA, 22 bp, Artificial Sequence
  primer
gcactctcctttcccacagaac

SEQ ID NO: 121712 - DNA, 38 bp, Artificial Sequence
  primer
gtaaaacgacggccagtagcaccagtgtgaggtttctg

SEQ ID NO: 121713 - DNA, 21 bp, Artificial Sequence
  primer
tatgagcgtgttgtgaaaggc

SEQ ID NO: 121714 - DNA, 21 bp, Artificial Sequence
  primer
ctgtgtttggatgggactctg

SEQ ID NO: 121715 - DNA, 22 bp, Artificial Sequence
  primer
gaagcaaagatacaggacctcg

SEQ ID NO: 121716 - DNA, 21 bp, Artificial Sequence
  primer
tccctcctttcagggactatg

SEQ ID NO: 121717 - DNA, 22 bp, Artificial Sequence
  primer
caaacggagtagagaatggagg

SEQ ID NO: 121718 - DNA, 21 bp, Artificial Sequence
  primer
cagggtcaaggtctcctcttc

SEQ ID NO: 121719 - DNA, 21 bp, Artificial Sequence
  primer
gagggaagggatcaaatctgg

SEQ ID NO: 121720 - DNA, 20 bp, Artificial Sequence
  primer
ggcatctctcacagaggctg

SEQ ID NO: 121721 - DNA, 21 bp, Artificial Sequence
  primer
cactcccaagtaggatggacc

SEQ ID NO: 121722 - DNA, 23 bp, Artificial Sequence
  primer
tgcctagctctaaagatggacag

SEQ ID NO: 121723 - DNA, 35 bp, Artificial Sequence
  primer
gtaaaacgacggccagtccaactccctgctcaccc

SEQ ID NO: 121724 - DNA, 22 bp, Artificial Sequence
  primer
tgcacacaggtccacttcttag

SEQ ID NO: 121725 - DNA, 37 bp, Artificial Sequence
  primer
gtaaaacgacggccagtaagaggcttccttctgtggg

SEQ ID NO: 121726 - DNA, 38 bp, Artificial Sequence
  primer
gtaaaacgacggccagtatgcagctacgttggtcacag

SEQ ID NO: 121727 - DNA, 38 bp, Artificial Sequence
  primer
gtaaaacgacggccagtacttatcccaccaccaagtgc

SEQ ID NO: 121728 - DNA, 21 bp, Artificial Sequence
  primer
ggaggcaaactcattcctcag

SEQ ID NO: 121729 - DNA, 39 bp, Artificial Sequence
  primer
gtaaaacgacggccagtggtcttcagtttcatgattcgc

SEQ ID NO: 121730 - DNA, 20 bp, Artificial Sequence
  primer
tttcgttcaccatttgccac

SEQ ID NO: 121731 - DNA, 21 bp, Artificial Sequence
  primer
ctttccatcgtggctcagaag

SEQ ID NO: 121732 - DNA, 39 bp, Artificial Sequence
  primer
gtaaaacgacggccagtaagtggactcagagctgtcctg

SEQ ID NO: 121733 - DNA, 37 bp, Artificial Sequence
  primer
gtaaaacgacggccagtgacagcagcttctctgctcg

SEQ ID NO: 121734 - DNA, 37 bp, Artificial Sequence
  primer
gtaaaacgacggccagtcctcttgggtgtctctgctg

SEQ ID NO: 121735 - DNA, 21 bp, Artificial Sequence
  primer
agacaatgctccactgtcagg

SEQ ID NO: 121736 - DNA, 21 bp, Artificial Sequence
  primer
gcaccgtaggagaggaaagag

SEQ ID NO: 121737 - DNA, 38 bp, Artificial Sequence
  primer
gtaaaacgacggccagtaggctgtgaaatgatgcttcc

SEQ ID NO: 121738 - DNA, 39 bp, Artificial Sequence
  primer
gtaaaacgacggccagtcaagctcatctccatcctgttc

SEQ ID NO: 121739 - DNA, 22 bp, Artificial Sequence
  primer
tgaagacatcaccttcccagac

SEQ ID NO: 121740 - DNA, 20 bp, Artificial Sequence
  primer
cgaacacacacggaaatgtg

SEQ ID NO: 121741 - DNA, 21 bp, Artificial Sequence
  primer
ccagattgctactcctggtcc

SEQ ID NO: 121742 - DNA, 21 bp, Artificial Sequence
  primer
gggttagagtcagccctatgc

SEQ ID NO: 121743 - DNA, 21 bp, Artificial Sequence
  primer
aactagagcaggctgagcacc

SEQ ID NO: 121744 - DNA, 38 bp, Artificial Sequence
  primer
gtaaaacgacggccagtctctggcccaggtcatatcag

SEQ ID NO: 121745 - DNA, 38 bp, Artificial Sequence
  primer
gtaaaacgacggccagtgcttcaaccatggtcctatcc

SEQ ID NO: 121746 - DNA, 38 bp, Artificial Sequence
  primer
gtaaaacgacggccagtcacttgtctgcacctacccag

SEQ ID NO: 121747 - DNA, 21 bp, Artificial Sequence
  primer
cttcagaacaatgctgccatc

SEQ ID NO: 121748 - DNA, 18 bp, Artificial Sequence
  primer
gggaggaaagggagaggg

SEQ ID NO: 121749 - DNA, 36 bp, Artificial Sequence
  primer
gtaaaacgacggccagtcgtgaggccagagttgagg

SEQ ID NO: 121750 - DNA, 39 bp, Artificial Sequence
  primer
gtaaaacgacggccagtcaaacatctgcaacttagcctg

SEQ ID NO: 121751 - DNA, 21 bp, Artificial Sequence
  primer
tcttcaggaaaggcacaaacc

SEQ ID NO: 121752 - DNA, 21 bp, Artificial Sequence
  primer
ggcataggaagctacgagtgg

SEQ ID NO: 121753 - DNA, 39 bp, Artificial Sequence
  primer
gtaaaacgacggccagtgatgggtttggaagttaaaggg

SEQ ID NO: 121754 - DNA, 21 bp, Artificial Sequence
  primer
aagctgcttccagcatttcag

SEQ ID NO: 121755 - DNA, 43 bp, Artificial Sequence
  primer
gtaaaacgacggccagtgcaggcttacatcaatgtattacaac

SEQ ID NO: 121756 - DNA, 21 bp, Artificial Sequence
  primer
gtcactgaacaagacgttcgg

SEQ ID NO: 121757 - DNA, 22 bp, Artificial Sequence
  primer
gcattatctgtactgcgtggct

SEQ ID NO: 121758 - DNA, 21 bp, Artificial Sequence
  primer
cttccttcaccaatttccctg

SEQ ID NO: 121759 - DNA, 38 bp, Artificial Sequence
  primer
gtaaaacgacggccagtagctgacatagaacccaagcc

SEQ ID NO: 121760 - DNA, 21 bp, Artificial Sequence
  primer
tcatcttaagcctgttcagcg

SEQ ID NO: 121761 - DNA, 40 bp, Artificial Sequence
  primer
gtaaaacgacggccagtcatactgaccacatattcgcctc

SEQ ID NO: 121762 - DNA, 39 bp, Artificial Sequence
  primer
gtaaaacgacggccagtagatttgagaatggcttgcatc

SEQ ID NO: 121763 - DNA, 21 bp, Artificial Sequence
  primer
cagggctcagatacaagggtc

SEQ ID NO: 121764 - DNA, 37 bp, Artificial Sequence
  primer
gtaaaacgacggccagtctgtcctggcagctgttacc

SEQ ID NO: 121765 - DNA, 38 bp, Artificial Sequence
  primer
gtaaaacgacggccagtaggacattcaagcattagccc

SEQ ID NO: 121766 - DNA, 20 bp, Artificial Sequence
  primer
gaaagcgactggcttcagtg

SEQ ID NO: 121767 - DNA, 39 bp, Artificial Sequence
  primer
gtaaaacgacggccagtccaagaagttccaaacaccatc

SEQ ID NO: 121768 - DNA, 21 bp, Artificial Sequence
  primer
cctcagcttcttggtttcagc

SEQ ID NO: 121769 - DNA, 39 bp, Artificial Sequence
  primer
gtaaaacgacggccagtccacttgtttcctttctgcaac

SEQ ID NO: 121770 - DNA, 38 bp, Artificial Sequence
  primer
gtaaaacgacggccagttctttgaccacttctccctcc

SEQ ID NO: 121771 - DNA, 21 bp, Artificial Sequence
  primer
atttaaggcccagcatcattg

SEQ ID NO: 121772 - DNA, 36 bp, Artificial Sequence
  primer
gtaaaacgacggccagtcctcccaagtgaggcactg

SEQ ID NO: 121773 - DNA, 22 bp, Artificial Sequence
  primer
cagaatcttagccacagtgtca

SEQ ID NO: 121774 - DNA, 21 bp, Artificial Sequence
  primer
gggaggtcacacagtcctttc

SEQ ID NO: 121775 - DNA, 21 bp, Artificial Sequence
  primer
aggctttaaagtccctggctc

SEQ ID NO: 121776 - DNA, 38 bp, Artificial Sequence
  primer
gtaaaacgacggccagtcgtccaaggcaagagaatagg

SEQ ID NO: 121777 - DNA, 21 bp, Artificial Sequence
  primer
tcatcctcaaagtatgggtcg

SEQ ID NO: 121778 - DNA, 21 bp, Artificial Sequence
  primer
agaagtggactgttgttgccc

SEQ ID NO: 121779 - DNA, 21 bp, Artificial Sequence
  primer
ttctctgagggcaggaaagtc

SEQ ID NO: 121780 - DNA, 21 bp, Artificial Sequence
  primer
ggctgactcaaagtgtgttgg

SEQ ID NO: 121781 - DNA, 37 bp, Artificial Sequence
  primer
gtaaaacgacggccagtgtttggacggctggtacttg

SEQ ID NO: 121782 - DNA, 37 bp, Artificial Sequence
  primer
gtaaaacgacggccagtagttcctcttgagaaccggg

SEQ ID NO: 121783 - DNA, 20 bp, Artificial Sequence
  primer
ctcctggctgggagagaaag

SEQ ID NO: 121784 - DNA, 38 bp, Artificial Sequence
  primer
gtaaaacgacggccagtgagacgagtgacagcatgtgg

SEQ ID NO: 121785 - DNA, 21 bp, Artificial Sequence
  primer
gtttcagtctctgctccaggg

SEQ ID NO: 121786 - DNA, 38 bp, Artificial Sequence
  primer
gtaaaacgacggccagtctcgatctgtccctgtccaag

SEQ ID NO: 121787 - DNA, 21 bp, Artificial Sequence
  primer
aaagtcagagaactcgtcggg

SEQ ID NO: 121788 - DNA, 21 bp, Artificial Sequence
  primer
agtgggacaaagacagcaagg

SEQ ID NO: 121789 - DNA, 36 bp, Artificial Sequence
  primer
gtaaaacgacggccagtacggagtggagtcagtggc

SEQ ID NO: 121790 - DNA, 20 bp, Artificial Sequence
  primer
ccatgtccagtttctctccg

SEQ ID NO: 121791 - DNA, 38 bp, Artificial Sequence
  primer
gtaaaacgacggccagtagagccaccagttgctttgac

SEQ ID NO: 121792 - DNA, 38 bp, Artificial Sequence
  primer
gtaaaacgacggccagtccactccctaagcccagagac

SEQ ID NO: 121793 - DNA, 37 bp, Artificial Sequence
  primer
gtaaaacgacggccagtagttggctgtactggcatgg

SEQ ID NO: 121794 - DNA, 21 bp, Artificial Sequence
  primer
tgccatctcagcaagcatatc

SEQ ID NO: 121795 - DNA, 21 bp, Artificial Sequence
  primer
agaactcactgtgcatcacgc

SEQ ID NO: 121796 - DNA, 38 bp, Artificial Sequence
  primer
gtaaaacgacggccagtagacccaagtgggtgagagac

SEQ ID NO: 121797 - DNA, 37 bp, Artificial Sequence
  primer
gtaaaacgacggccagtacagggctgatgcctaggag

SEQ ID NO: 121798 - DNA, 21 bp, Artificial Sequence
  primer
acctggagacatagtcctggg

SEQ ID NO: 121799 - DNA, 21 bp, Artificial Sequence
  primer
agattccagctagtcccaccc

SEQ ID NO: 121800 - DNA, 20 bp, Artificial Sequence
  primer
ccaaactcttggatcccgtc

SEQ ID NO: 121801 - DNA, 21 bp, Artificial Sequence
  primer
gcggtcgatgtactggaagtc

SEQ ID NO: 121802 - DNA, 38 bp, Artificial Sequence
  primer
gtaaaacgacggccagttatgaaccatggcttggattg

SEQ ID NO: 121803 - DNA, 22 bp, Artificial Sequence
  primer
ccgacagagataatgggtcttg

SEQ ID NO: 121804 - DNA, 38 bp, Artificial Sequence
  primer
gtaaaacgacggccagtgaggctggagtcgagagagtg

SEQ ID NO: 121805 - DNA, 21 bp, Artificial Sequence
  primer
gtgggactagggctgctacac

SEQ ID NO: 121806 - DNA, 21 bp, Artificial Sequence
  primer
tcaaggtggtgagtgacttgc

SEQ ID NO: 121807 - DNA, 21 bp, Artificial Sequence
  primer
ccctttccagagaagctgtcc

SEQ ID NO: 121808 - DNA, 38 bp, Artificial Sequence
  primer
gtaaaacgacggccagtgtctccaaacaggtccagctc

SEQ ID NO: 121809 - DNA, 21 bp, Artificial Sequence
  primer
gagagtggctttgagtgaccc

SEQ ID NO: 121810 - DNA, 18 bp, Artificial Sequence
  primer
gctcggcgttccactagc

SEQ ID NO: 121811 - DNA, 20 bp, Artificial Sequence
  primer
gagagaagggtggccaagag

SEQ ID NO: 121812 - DNA, 46 bp, Artificial Sequence
  primer
gtaaaacgacggccagtttccacattagtatctgaaactctctaca

SEQ ID NO: 121813 - DNA, 42 bp, Artificial Sequence
  primer
gtaaaacgacggccagtaatctacttctttcatgtgctttcg

SEQ ID NO: 121814 - DNA, 38 bp, Artificial Sequence
  primer
gtaaaacgacggccagtcaaccagcaacagtcacattc

SEQ ID NO: 121815 - DNA, 42 bp, Artificial Sequence
  primer
gtaaaacgacggccagtttggtctttggtatttcactgattc

SEQ ID NO: 121816 - DNA, 22 bp, Artificial Sequence
  primer
tcacagaacctgttatgaaggg

SEQ ID NO: 121817 - DNA, 21 bp, Artificial Sequence
  primer
taatgcaggaattcgaagagc

SEQ ID NO: 121818 - DNA, 38 bp, Artificial Sequence
  primer
gtaaaacgacggccagtttgctagtctgagggtgggtc

SEQ ID NO: 121819 - DNA, 21 bp, Artificial Sequence
  primer
ttggcacatttaaggcatctg

SEQ ID NO: 121820 - DNA, 21 bp, Artificial Sequence
  primer
aaatgaaatgtgcaaatgcgt

SEQ ID NO: 121821 - DNA, 22 bp, Artificial Sequence
  primer
tgaacaggcatttggttaactg

SEQ ID NO: 121822 - DNA, 35 bp, Artificial Sequence
  primer
gtaaaacgacggccagtgaacccagccacctcctg

SEQ ID NO: 121823 - DNA, 20 bp, Artificial Sequence
  primer
cctggatctgggaggagttc

SEQ ID NO: 121824 - DNA, 21 bp, Artificial Sequence
  primer
ccctcgatcattctccctttc

SEQ ID NO: 121825 - DNA, 22 bp, Artificial Sequence
  primer
gaaagggaaggaatacggacag

SEQ ID NO: 121826 - DNA, 21 bp, Artificial Sequence
  primer
ctgagatgtcattgctggcac

SEQ ID NO: 121827 - DNA, 20 bp, Artificial Sequence
  primer
acctaggctgggagttcagg

SEQ ID NO: 121828 - DNA, 38 bp, Artificial Sequence
  primer
gtaaaacgacggccagtatacgaggctacgacctccag

SEQ ID NO: 121829 - DNA, 36 bp, Artificial Sequence
  primer
gtaaaacgacggccagtacactacgtggccgctctc

SEQ ID NO: 121830 - DNA, 21 bp, Artificial Sequence
  primer
aatgggatgtgggatgttacg

SEQ ID NO: 121831 - DNA, 38 bp, Artificial Sequence
  primer
gtaaaacgacggccagttagtgaaagaggaccgttggc

SEQ ID NO: 121832 - DNA, 21 bp, Artificial Sequence
  primer
gcaagtgcgtgtctctctctg

SEQ ID NO: 121833 - DNA, 21 bp, Artificial Sequence
  primer
cagccatcattctggtacagc

SEQ ID NO: 121834 - DNA, 21 bp, Artificial Sequence
  primer
tactcaaagctggcagcagag

SEQ ID NO: 121835 - DNA, 38 bp, Artificial Sequence
  primer
gtaaaacgacggccagtattggatccctgatcatctgc

SEQ ID NO: 121836 - DNA, 21 bp, Artificial Sequence
  primer
gccatccctgttccataagtc

SEQ ID NO: 121837 - DNA, 38 bp, Artificial Sequence
  primer
gtaaaacgacggccagttgcttctattcctgcacatcg

SEQ ID NO: 121838 - DNA, 37 bp, Artificial Sequence
  primer
gtaaaacgacggccagtaaccatggctgtgtcctctg

SEQ ID NO: 121839 - DNA, 21 bp, Artificial Sequence
  primer
aagagcccaggtgacaatctg

SEQ ID NO: 121840 - DNA, 38 bp, Artificial Sequence
  primer
gtaaaacgacggccagtcattcccagcctgaacctaag

SEQ ID NO: 121841 - DNA, 21 bp, Artificial Sequence
  primer
atttgtcctcagtgggtggag

SEQ ID NO: 121842 - DNA, 21 bp, Artificial Sequence
  primer
ctcatctgggaacatttgtgg

SEQ ID NO: 121843 - DNA, 36 bp, Artificial Sequence
  primer
gtaaaacgacggccagtacaggagagaaggcagccc

SEQ ID NO: 121844 - DNA, 20 bp, Artificial Sequence
  primer
aaagagggccagcttctcac

SEQ ID NO: 121845 - DNA, 36 bp, Artificial Sequence
  primer
gtaaaacgacggccagtctgtgccaggctcaagctc

SEQ ID NO: 121846 - DNA, 35 bp, Artificial Sequence
  primer
gtaaaacgacggccagtctgcacagcctgctcgtc

SEQ ID NO: 121847 - DNA, 36 bp, Artificial Sequence
  primer
gtaaaacgacggccagtctcttcttgtggccttcgg

SEQ ID NO: 121848 - DNA, 21 bp, Artificial Sequence
  primer
ctgactgcctcgtctacccac

SEQ ID NO: 121849 - DNA, 18 bp, Artificial Sequence
  primer
catccaagagccgcagtg

SEQ ID NO: 121850 - DNA, 19 bp, Artificial Sequence
  primer
cctgagagtggcaggaagg

SEQ ID NO: 121851 - DNA, 19 bp, Artificial Sequence
  primer
ccttcctggtactgctggg

SEQ ID NO: 121852 - DNA, 38 bp, Artificial Sequence
  primer
gtaaaacgacggccagtgtcgatgatctcggctttcag

SEQ ID NO: 121853 - DNA, 21 bp, Artificial Sequence
  primer
ctcatagatgctcaggcgttc

SEQ ID NO: 121854 - DNA, 20 bp, Artificial Sequence
  primer
cagtgtagccagtgacagcg

SEQ ID NO: 121855 - DNA, 21 bp, Artificial Sequence
  primer
gaagggtccaacaggatcaag

SEQ ID NO: 121856 - DNA, 38 bp, Artificial Sequence
  primer
gtaaaacgacggccagttgaaaccgtccatacttcacg

SEQ ID NO: 121857 - DNA, 21 bp, Artificial Sequence
  primer
cagctgctggtcaatgatacc

SEQ ID NO: 121858 - DNA, 38 bp, Artificial Sequence
  primer
gtaaaacgacggccagttggaacacagacacctgcttc

SEQ ID NO: 121859 - DNA, 38 bp, Artificial Sequence
  primer
gtaaaacgacggccagtgacaaggctgtctccatctcc

SEQ ID NO: 121860 - DNA, 21 bp, Artificial Sequence
  primer
ggtctcctgtacccacctctg

SEQ ID NO: 121861 - DNA, 35 bp, Artificial Sequence
  primer
gtaaaacgacggccagtctgtagcagcacaccggc

SEQ ID NO: 121862 - DNA, 21 bp, Artificial Sequence
  primer
ggccctagagtagggatctgg

SEQ ID NO: 121863 - DNA, 38 bp, Artificial Sequence
  primer
gtaaaacgacggccagtttgtcaactgcagtcagcacc

SEQ ID NO: 121864 - DNA, 21 bp, Artificial Sequence
  primer
tcccagagtgacacgctacac

SEQ ID NO: 121865 - DNA, 19 bp, Artificial Sequence
  primer
gtccagcgtcttcctgctg

SEQ ID NO: 121866 - DNA, 38 bp, Artificial Sequence
  primer
gtaaaacgacggccagtgagatctgctgcccggtatag

SEQ ID NO: 121867 - DNA, 38 bp, Artificial Sequence
  primer
gtaaaacgacggccagtgtcccagaaagagaccacctg

SEQ ID NO: 121868 - DNA, 38 bp, Artificial Sequence
  primer
gtaaaacgacggccagtatttccagcaatttctccagg

SEQ ID NO: 121869 - DNA, 38 bp, Artificial Sequence
  primer
gtaaaacgacggccagtcacagcctcatccacagagag

SEQ ID NO: 121870 - DNA, 21 bp, Artificial Sequence
  primer
aaccgtttcctcatgtgcttc

SEQ ID NO: 121871 - DNA, 38 bp, Artificial Sequence
  primer
gtaaaacgacggccagtgttggtttctggcctctgaac

SEQ ID NO: 121872 - DNA, 38 bp, Artificial Sequence
  primer
gtaaaacgacggccagtagatgctcatcttctcctggc

SEQ ID NO: 121873 - DNA, 38 bp, Artificial Sequence
  primer
gtaaaacgacggccagtgaaacacctcgatggacaaag

SEQ ID NO: 121874 - DNA, 38 bp, Artificial Sequence
  primer
gtaaaacgacggccagtagtctcgtgttgtctagcccg

SEQ ID NO: 121875 - DNA, 21 bp, Artificial Sequence
  primer
ggatcctgagtccacgagttc

SEQ ID NO: 121876 - DNA, 23 bp, Artificial Sequence
  primer
caacaataaatgatgaggttccc

SEQ ID NO: 121877 - DNA, 20 bp, Artificial Sequence
  primer
aacagccagggaggtcattc

SEQ ID NO: 121878 - DNA, 22 bp, Artificial Sequence
  primer
caatctcctgaccttgtgatcc

SEQ ID NO: 121879 - DNA, 21 bp, Artificial Sequence
  primer
atgggagctcgacatttcttg

SEQ ID NO: 121880 - DNA, 19 bp, Artificial Sequence
  primer
gtactccagcccaggcaac

SEQ ID NO: 121881 - DNA, 19 bp, Artificial Sequence
  primer
ttacagaaggccaccagcc

SEQ ID NO: 121882 - DNA, 39 bp, Artificial Sequence
  primer
gtaaaacgacggccagttcaccttccctatctctcaagc

SEQ ID NO: 121883 - DNA, 22 bp, Artificial Sequence
  primer
ccttggatcataaggcacaaac

SEQ ID NO: 121884 - DNA, 43 bp, Artificial Sequence
  primer
gtaaaacgacggccagtaccatgagcacagtaatgacttctac

SEQ ID NO: 121885 - DNA, 19 bp, Artificial Sequence
  primer
atgccactgccatgaaagc

SEQ ID NO: 121886 - DNA, 38 bp, Artificial Sequence
  primer
gtaaaacgacggccagtttgcagtagctatgtctgggc

SEQ ID NO: 121887 - DNA, 21 bp, Artificial Sequence
  primer
ctcggccaacttacatcattt

SEQ ID NO: 121888 - DNA, 21 bp, Artificial Sequence
  primer
ttcaatgtgcgtgttgtttca

SEQ ID NO: 121889 - DNA, 41 bp, Artificial Sequence
  primer
gtaaaacgacggccagttgcaaagagcaagacttaactgtc

SEQ ID NO: 121890 - DNA, 21 bp, Artificial Sequence
  primer
ttagcttacgaaccacctccc

SEQ ID NO: 121891 - DNA, 38 bp, Artificial Sequence
  primer
gtaaaacgacggccagtgcttggcacatagcaggtatc

SEQ ID NO: 121892 - DNA, 39 bp, Artificial Sequence
  primer
gtaaaacgacggccagtgaagttagccagatttgatggg

SEQ ID NO: 121893 - DNA, 22 bp, Artificial Sequence
  primer
tgctgacattgtagctttagcg

SEQ ID NO: 121894 - DNA, 44 bp, Artificial Sequence
  primer
gtaaaacgacggccagtaaatcaatcactatctcatggtactgc

SEQ ID NO: 121895 - DNA, 21 bp, Artificial Sequence
  primer
tcactgtgaggaaaggtacgc

SEQ ID NO: 121896 - DNA, 44 bp, Artificial Sequence
  primer
gtaaaacgacggccagtcgtcaacagagattatagctatcacaa

SEQ ID NO: 121897 - DNA, 21 bp, Artificial Sequence
  primer
ttataagcatgagctgccacg

SEQ ID NO: 121898 - DNA, 45 bp, Artificial Sequence
  primer
gtaaaacgacggccagtttccttaataataacattccaataagca

SEQ ID NO: 121899 - DNA, 25 bp, Artificial Sequence
  primer
ctgtgatgacagaagaaattattgg

SEQ ID NO: 121900 - DNA, 24 bp, Artificial Sequence
  primer
tgtgtcagtgctcaacagtttaag

SEQ ID NO: 121901 - DNA, 21 bp, Artificial Sequence
  primer
tggcaaattaagtagcatggg

SEQ ID NO: 121902 - DNA, 22 bp, Artificial Sequence
  primer
ccatgcataaattcaatgagcc

SEQ ID NO: 121903 - DNA, 37 bp, Artificial Sequence
  primer
gtaaaacgacggccagtgatggagcaccaggttcaag

SEQ ID NO: 121904 - DNA, 21 bp, Artificial Sequence
  primer
tctggctttcaattgtcttca

SEQ ID NO: 121905 - DNA, 19 bp, Artificial Sequence
  primer
ctttccctcacacacaccg

SEQ ID NO: 121906 - DNA, 24 bp, Artificial Sequence
  primer
tcgagctagctggtaatctacagg

SEQ ID NO: 121907 - DNA, 21 bp, Artificial Sequence
  primer
cgctacaaattcccttcatcc

SEQ ID NO: 121908 - DNA, 26 bp, Artificial Sequence
  primer
ttggaaatactttgttacacacttgc

SEQ ID NO: 121909 - DNA, 20 bp, Artificial Sequence
  primer
ctgagtgaaagggccaaagg

SEQ ID NO: 121910 - DNA, 23 bp, Artificial Sequence
  primer
aaacaccagtaacagcttctccc

SEQ ID NO: 121911 - DNA, 41 bp, Artificial Sequence
  primer
gtaaaacgacggccagtcaaagagttatacatgctcctggc

SEQ ID NO: 121912 - DNA, 21 bp, Artificial Sequence
  primer
ttgtggtgagccaagattgtg

SEQ ID NO: 121913 - DNA, 39 bp, Artificial Sequence
  primer
gtaaaacgacggccagtgcctacagatggtaaggagtgg

SEQ ID NO: 121914 - DNA, 42 bp, Artificial Sequence
  primer
gtaaaacgacggccagtttataaagcttcaggtaacccattc

SEQ ID NO: 121915 - DNA, 40 bp, Artificial Sequence
  primer
gtaaaacgacggccagtggcacaaactaaaccacaaacag

SEQ ID NO: 121916 - DNA, 21 bp, Artificial Sequence
  primer
aaacagaaaggtgtgtgtggg

SEQ ID NO: 121917 - DNA, 23 bp, Artificial Sequence
  primer
cagaattccaagcaagaacaatc

SEQ ID NO: 121918 - DNA, 38 bp, Artificial Sequence
  primer
gtaaaacgacggccagtccaaccaccaccatcaataac

SEQ ID NO: 121919 - DNA, 39 bp, Artificial Sequence
  primer
gtaaaacgacggccagttgaaggagcagaagttggaaag

SEQ ID NO: 121920 - DNA, 37 bp, Artificial Sequence
  primer
gtaaaacgacggccagtgtcctcagatgaggcaaggc

SEQ ID NO: 121921 - DNA, 38 bp, Artificial Sequence
  primer
gtaaaacgacggccagtattgcctaaaggtgaagtcgg

SEQ ID NO: 121922 - DNA, 21 bp, Artificial Sequence
  primer
cgacagactgagttggtaggc

SEQ ID NO: 121923 - DNA, 26 bp, Artificial Sequence
  primer
gggcttcagtttcagacctaaataac

SEQ ID NO: 121924 - DNA, 39 bp, Artificial Sequence
  primer
gtaaaacgacggccagtcattccagttaattccagtggg

SEQ ID NO: 121925 - DNA, 20 bp, Artificial Sequence
  primer
gaagctgccaagcaacacag

SEQ ID NO: 121926 - DNA, 39 bp, Artificial Sequence
  primer
gtaaaacgacggccagttgttaagcaaacatgccaacag

SEQ ID NO: 121927 - DNA, 21 bp, Artificial Sequence
  primer
agaatgaatgacagcagcagg

SEQ ID NO: 121928 - DNA, 38 bp, Artificial Sequence
  primer
gtaaaacgacggccagtgatgcaaacttggcagactcc

SEQ ID NO: 121929 - DNA, 38 bp, Artificial Sequence
  primer
gtaaaacgacggccagtttgtattcccatgctcacagg

SEQ ID NO: 121930 - DNA, 35 bp, Artificial Sequence
  primer
gtaaaacgacggccagtagtctcccagcgcctcag

SEQ ID NO: 121931 - DNA, 36 bp, Artificial Sequence
  primer
gtaaaacgacggccagtcagccgggcttctattctg

SEQ ID NO: 121932 - DNA, 19 bp, Artificial Sequence
  primer
agctgcagcctgagaggtc

SEQ ID NO: 121933 - DNA, 21 bp, Artificial Sequence
  primer
tgttaagtttgacagccgtgc

SEQ ID NO: 121934 - DNA, 24 bp, Artificial Sequence
  primer
tggagctagacagaggtaatgaag

SEQ ID NO: 121935 - DNA, 40 bp, Artificial Sequence
  primer
gtaaaacgacggccagtcagaagagctgacacaatcatcc

SEQ ID NO: 121936 - DNA, 21 bp, Artificial Sequence
  primer
agcaagagccttgtaagcacc

SEQ ID NO: 121937 - DNA, 38 bp, Artificial Sequence
  primer
gtaaaacgacggccagtagacaaacgaatccagcaacc

SEQ ID NO: 121938 - DNA, 21 bp, Artificial Sequence
  primer
atcacaagcttgaccgttctg

SEQ ID NO: 121939 - DNA, 39 bp, Artificial Sequence
  primer
gtaaaacgacggccagtgaataaaggacgccagacacag

SEQ ID NO: 121940 - DNA, 18 bp, Artificial Sequence
  primer
catgtgtgccaccagtgc

SEQ ID NO: 121941 - DNA, 38 bp, Artificial Sequence
  primer
gtaaaacgacggccagtaaacttccaggtgagcctctg

SEQ ID NO: 121942 - DNA, 38 bp, Artificial Sequence
  primer
gtaaaacgacggccagtgagctcatgtttccatccagg

SEQ ID NO: 121943 - DNA, 37 bp, Artificial Sequence
  primer
gtaaaacgacggccagtcacgtggtgtttggaggaac

SEQ ID NO: 121944 - DNA, 21 bp, Artificial Sequence
  primer
aaaggagttcagcagtggcag

SEQ ID NO: 121945 - DNA, 36 bp, Artificial Sequence
  primer
gtaaaacgacggccagtcaacgttggccatgaacag

SEQ ID NO: 121946 - DNA, 20 bp, Artificial Sequence
  primer
cctccatttcagattgtggc

SEQ ID NO: 121947 - DNA, 38 bp, Artificial Sequence
  primer
gtaaaacgacggccagttatgtggacacaagtcccacc

SEQ ID NO: 121948 - DNA, 20 bp, Artificial Sequence
  primer
accatgtacgctccacgaag

SEQ ID NO: 121949 - DNA, 39 bp, Artificial Sequence
  primer
gtaaaacgacggccagtgagtgaaagtgttaactgcggg

SEQ ID NO: 121950 - DNA, 21 bp, Artificial Sequence
  primer
tgaccttgtgttggaaaggtg

SEQ ID NO: 121951 - DNA, 38 bp, Artificial Sequence
  primer
gtaaaacgacggccagtatctgctgctactctgggctg

SEQ ID NO: 121952 - DNA, 38 bp, Artificial Sequence
  primer
gtaaaacgacggccagttaaagaagctgggaggtttgc

SEQ ID NO: 121953 - DNA, 41 bp, Artificial Sequence
  primer
gtaaaacgacggccagtacagaaacatcttccaagtgtgag

SEQ ID NO: 121954 - DNA, 21 bp, Artificial Sequence
  primer
aacagcaagcagagttcatgg

SEQ ID NO: 121955 - DNA, 25 bp, Artificial Sequence
  primer
aaataagactggcaaggataaatgg

SEQ ID NO: 121956 - DNA, 23 bp, Artificial Sequence
  primer
cagtgctggattgtgtttaaagg

SEQ ID NO: 121957 - DNA, 23 bp, Artificial Sequence
  primer
ttccttacgagatgctcagaaac

SEQ ID NO: 121958 - DNA, 22 bp, Artificial Sequence
  primer
ttgggagaacaaatgtgttgag

SEQ ID NO: 121959 - DNA, 22 bp, Artificial Sequence
  primer
tcagcatcagaatttgaaagca

SEQ ID NO: 121960 - DNA, 21 bp, Artificial Sequence
  primer
aattcaaagggcatagccatc

SEQ ID NO: 121961 - DNA, 37 bp, Artificial Sequence
  primer
gtaaaacgacggccagtccttagatgatacacccgcc

SEQ ID NO: 121962 - DNA, 27 bp, Artificial Sequence
  primer
agcatggatagagtgagaatagaagtc

SEQ ID NO: 121963 - DNA, 22 bp, Artificial Sequence
  primer
tggcaaagaaatagtacccacg

SEQ ID NO: 121964 - DNA, 39 bp, Artificial Sequence
  primer
gtaaaacgacggccagttcctatgacgcttagtccttcg

SEQ ID NO: 121965 - DNA, 40 bp, Artificial Sequence
  primer
gtaaaacgacggccagttcaggacagggtaacattcagac

SEQ ID NO: 121966 - DNA, 44 bp, Artificial Sequence
  primer
gtaaaacgacggccagtgatggaaagtttaaagaagcagtagac

SEQ ID NO: 121967 - DNA, 18 bp, Artificial Sequence
  primer
aaacccaccctgccactc

SEQ ID NO: 121968 - DNA, 21 bp, Artificial Sequence
  primer
gtctctcaccattgccactcc

SEQ ID NO: 121969 - DNA, 21 bp, Artificial Sequence
  primer
ggcatgcattagagagtggag

SEQ ID NO: 121970 - DNA, 21 bp, Artificial Sequence
  primer
caaagtatgcagtctgtgccc

SEQ ID NO: 121971 - DNA, 40 bp, Artificial Sequence
  primer
gtaaaacgacggccagttctgttaagaaagggaaattggc

SEQ ID NO: 121972 - DNA, 20 bp, Artificial Sequence
  primer
ctcactcaggtttgcatggg

SEQ ID NO: 121973 - DNA, 21 bp, Artificial Sequence
  primer
gatgtcctctcggatcagctc

SEQ ID NO: 121974 - DNA, 18 bp, Artificial Sequence
  primer
caggcctgtctgctctgc

SEQ ID NO: 121975 - DNA, 36 bp, Artificial Sequence
  primer
gtaaaacgacggccagtctcctcctccaagaccctg

SEQ ID NO: 121976 - DNA, 21 bp, Artificial Sequence
  primer
tatccatgactgaggtgaggc

SEQ ID NO: 121977 - DNA, 21 bp, Artificial Sequence
  primer
agccaagattcacacccagac

SEQ ID NO: 121978 - DNA, 21 bp, Artificial Sequence
  primer
ctgccttccagaacttccttc

SEQ ID NO: 121979 - DNA, 21 bp, Artificial Sequence
  primer
ccaggctggtgttgtagactg

SEQ ID NO: 121980 - DNA, 21 bp, Artificial Sequence
  primer
ccataacgcagaagtctgacc

SEQ ID NO: 121981 - DNA, 37 bp, Artificial Sequence
  primer
gtaaaacgacggccagttaagatggcggtgaggtcag

SEQ ID NO: 121982 - DNA, 21 bp, Artificial Sequence
  primer
ctacaagtcgaacccgattcc

SEQ ID NO: 121983 - DNA, 21 bp, Artificial Sequence
  primer
cgtgttcacaatctgtcaggg

SEQ ID NO: 121984 - DNA, 38 bp, Artificial Sequence
  primer
gtaaaacgacggccagtaacacaactaagccacgcctc

SEQ ID NO: 121985 - DNA, 21 bp, Artificial Sequence
  primer
agtaagacagtcgggtcaggc

SEQ ID NO: 121986 - DNA, 20 bp, Artificial Sequence
  primer
atcaccatctcacccacctg

SEQ ID NO: 121987 - DNA, 38 bp, Artificial Sequence
  primer
gtaaaacgacggccagtcaggacctgggtgtggtaaag

SEQ ID NO: 121988 - DNA, 20 bp, Artificial Sequence
  primer
gctccagcactcttgacagc

SEQ ID NO: 121989 - DNA, 20 bp, Artificial Sequence
  primer
ccctttgctctttctgagcc

SEQ ID NO: 121990 - DNA, 38 bp, Artificial Sequence
  primer
gtaaaacgacggccagtaccagacagaccctcacttcg

SEQ ID NO: 121991 - DNA, 21 bp, Artificial Sequence
  primer
ctttctctttgtcctggaggg

SEQ ID NO: 121992 - DNA, 21 bp, Artificial Sequence
  primer
aagatcgacttccgctattgg

SEQ ID NO: 121993 - DNA, 38 bp, Artificial Sequence
  primer
gtaaaacgacggccagtcactcaccaaacaggtccttg

SEQ ID NO: 121994 - DNA, 21 bp, Artificial Sequence
  primer
ttcggaaggttgattagggtc

SEQ ID NO: 121995 - DNA, 22 bp, Artificial Sequence
  primer
gtggagacgagaacctgaggac

SEQ ID NO: 121996 - DNA, 21 bp, Artificial Sequence
  primer
tccagggaccagaatgatagg

SEQ ID NO: 121997 - DNA, 36 bp, Artificial Sequence
  primer
gtaaaacgacggccagtctacttcagggtctgcggc

SEQ ID NO: 121998 - DNA, 19 bp, Artificial Sequence
  primer
gctgccgaatcttctcctg

SEQ ID NO: 121999 - DNA, 20 bp, Artificial Sequence
  primer
tatcttctgagccagcacgg

SEQ ID NO: 122000 - DNA, 37 bp, Artificial Sequence
  primer
gtaaaacgacggccagtggacagcaaggaccagtgtc

SEQ ID NO: 122001 - DNA, 21 bp, Artificial Sequence
  primer
ttcctccacctccatgagtag

SEQ ID NO: 122002 - DNA, 37 bp, Artificial Sequence
  primer
gtaaaacgacggccagtggttctggatgtgcttctgc

SEQ ID NO: 122003 - DNA, 20 bp, Artificial Sequence
  primer
ggcacagtgaggttcagagg

SEQ ID NO: 122004 - DNA, 19 bp, Artificial Sequence
  primer
ctctccagaactggcccac

SEQ ID NO: 122005 - DNA, 19 bp, Artificial Sequence
  primer
ctgagctgtggctgaaggg

SEQ ID NO: 122006 - DNA, 21 bp, Artificial Sequence
  primer
cacttgaacaatgcacttgcc

SEQ ID NO: 122007 - DNA, 37 bp, Artificial Sequence
  primer
gtaaaacgacggccagttcctgatcagagtccaaggg

SEQ ID NO: 122008 - DNA, 35 bp, Artificial Sequence
  primer
gtaaaacgacggccagtcagccctttccttctgcc

SEQ ID NO: 122009 - DNA, 19 bp, Artificial Sequence
  primer
cgttgacctcgtccatgtg

SEQ ID NO: 122010 - DNA, 37 bp, Artificial Sequence
  primer
gtaaaacgacggccagtgtcaggatgcccaggttctc

SEQ ID NO: 122011 - DNA, 21 bp, Artificial Sequence
  primer
gcttctagggaggagaaatgg

SEQ ID NO: 122012 - DNA, 21 bp, Artificial Sequence
  primer
gacctctagccagcaccacac

SEQ ID NO: 122013 - DNA, 21 bp, Artificial Sequence
  primer
cagaggtactcacctccaccc

SEQ ID NO: 122014 - DNA, 20 bp, Artificial Sequence
  primer
agtgtccatgttctggcagg

SEQ ID NO: 122015 - DNA, 38 bp, Artificial Sequence
  primer
gtaaaacgacggccagtttgggtgtgtgttgtatgtgg

SEQ ID NO: 122016 - DNA, 21 bp, Artificial Sequence
  primer
cagtcaggcaggctaagtgtg

SEQ ID NO: 122017 - DNA, 38 bp, Artificial Sequence
  primer
gtaaaacgacggccagtcagtctctagtgccctctggg

SEQ ID NO: 122018 - DNA, 38 bp, Artificial Sequence
  primer
gtaaaacgacggccagtgtaaaggcacttggttctcgg

SEQ ID NO: 122019 - DNA, 21 bp, Artificial Sequence
  primer
taaacaagcctctctggcctc

SEQ ID NO: 122020 - DNA, 21 bp, Artificial Sequence
  primer
tcaatgtactgtgcctgggtg

SEQ ID NO: 122021 - DNA, 19 bp, Artificial Sequence
  primer
ttatgccttggctggaagg

SEQ ID NO: 122022 - DNA, 21 bp, Artificial Sequence
  primer
cctgtctcccttagagccttg

SEQ ID NO: 122023 - DNA, 36 bp, Artificial Sequence
  primer
gtaaaacgacggccagtggccacctctgatgtcctg

SEQ ID NO: 122024 - DNA, 21 bp, Artificial Sequence
  primer
agttgtgtgaccatggtttgg

SEQ ID NO: 122025 - DNA, 21 bp, Artificial Sequence
  primer
tttcacccaaggtaggagagg

SEQ ID NO: 122026 - DNA, 38 bp, Artificial Sequence
  primer
gtaaaacgacggccagtcctccttctccctctctaggc

SEQ ID NO: 122027 - DNA, 38 bp, Artificial Sequence
  primer
gtaaaacgacggccagtcccatgataaagttggcacac

SEQ ID NO: 122028 - DNA, 21 bp, Artificial Sequence
  primer
tgttctgggtctctgggtttc

SEQ ID NO: 122029 - DNA, 21 bp, Artificial Sequence
  primer
gcctcaaggtaagcctgaatg

SEQ ID NO: 122030 - DNA, 21 bp, Artificial Sequence
  primer
caaactgggatccagaagagg

SEQ ID NO: 122031 - DNA, 38 bp, Artificial Sequence; identical to SEQ ID NO: 122026
  primer

SEQ ID NO: 122032 - DNA, 38 bp, Artificial Sequence; identical to SEQ ID NO: 122018
  primer

SEQ ID NO: 122033 - DNA, 21 bp, Artificial Sequence
  primer
aaggaccaaggtgcttgtgag

SEQ ID NO: 122034 - DNA, 21 bp, Artificial Sequence
  primer
ttcaagccaacagaaatccag

SEQ ID NO: 122035 - DNA, 21 bp, Artificial Sequence
  primer
caagcagcacaatgaccaaac

SEQ ID NO: 122036 - DNA, 39 bp, Artificial Sequence
  primer
gtaaaacgacggccagtgggcttaggtaggaattgaagg

SEQ ID NO: 122037 - DNA, 23 bp, Artificial Sequence
  primer
caagacctaagcatgaatcttcc

SEQ ID NO: 122038 - DNA, 39 bp, Artificial Sequence
  primer
gtaaaacgacggccagtcagccaataatccaataccagg

SEQ ID NO: 122039 - DNA, 21 bp, Artificial Sequence
  primer
aggtcaaagtttcggatcagg

SEQ ID NO: 122040 - DNA, 38 bp, Artificial Sequence
  primer
gtaaaacgacggccagtgaaggagccaccaccatactc

SEQ ID NO: 122041 - DNA, 41 bp, Artificial Sequence
  primer
gtaaaacgacggccagtacgtcccaataacagatttaaagg

SEQ ID NO: 122042 - DNA, 37 bp, Artificial Sequence
  primer
gtaaaacgacggccagtctgccaaacagcacaacaac

SEQ ID NO: 122043 - DNA, 22 bp, Artificial Sequence
  primer
tgagttcaggaatcagctcctc

SEQ ID NO: 122044 - DNA, 21 bp, Artificial Sequence
  primer
ggaggctgttcaaagagatgg

SEQ ID NO: 122045 - DNA, 21 bp, Artificial Sequence
  primer
agtgagatgaacttggctggg

SEQ ID NO: 122046 - DNA, 38 bp, Artificial Sequence
  primer
gtaaaacgacggccagttccctttaccctctctcctcc

SEQ ID NO: 122047 - DNA, 21 bp, Artificial Sequence
  primer
atgggtgggataggttagcag

SEQ ID NO: 122048 - DNA, 21 bp, Artificial Sequence
  primer
cctcaagtcactgcactggtc

SEQ ID NO: 122049 - DNA, 20 bp, Artificial Sequence
  primer
gctccagtcttccagatccc

SEQ ID NO: 122050 - DNA, 19 bp, Artificial Sequence
  primer
acatcccaccattgcttcc

SEQ ID NO: 122051 - DNA, 38 bp, Artificial Sequence
  primer
gtaaaacgacggccagtatccgcaaggatgtgttaagg

SEQ ID NO: 122052 - DNA, 19 bp, Artificial Sequence
  primer
tcctggcagtaagcttggc

SEQ ID NO: 122053 - DNA, 21 bp, Artificial Sequence
  primer
cagaaaggaggtaccagggtc

SEQ ID NO: 122054 - DNA, 39 bp, Artificial Sequence
  primer
gtaaaacgacggccagtcctcctgatttcagatcctgtg

SEQ ID NO: 122055 - DNA, 38 bp, Artificial Sequence
  primer
gtaaaacgacggccagtaagaggactcagccatccatc

SEQ ID NO: 122056 - DNA, 21 bp, Artificial Sequence
  primer
cgttgtttccatcaactccac

SEQ ID NO: 122057 - DNA, 38 bp, Artificial Sequence
  primer
gtaaaacgacggccagtgtcagggtagagtggcaggag

SEQ ID NO: 122058 - DNA, 20 bp, Artificial Sequence
  primer
tttcactgctcctccctgtc

SEQ ID NO: 122059 - DNA, 21 bp, Artificial Sequence
  primer
ggagtctcagtgaggtcccag

SEQ ID NO: 122060 - DNA, 21 bp, Artificial Sequence
  primer
cttcaaggctgatggtaaggg

SEQ ID NO: 122061 - DNA, 38 bp, Artificial Sequence
  primer
gtaaaacgacggccagtaaagagagctccaggtgatgc

SEQ ID NO: 122062 - DNA, 21 bp, Artificial Sequence
  primer
cttccatggtatgagcttggc

SEQ ID NO: 122063 - DNA, 21 bp, Artificial Sequence
  primer
ccattgaccacaccttcagtg

SEQ ID NO: 122064 - DNA, 38 bp, Artificial Sequence
  primer
gtaaaacgacggccagtgcttccaggaggaaatttgag

SEQ ID NO: 122065 - DNA, 21 bp, Artificial Sequence
  primer
gatatggtcctgctctcaggg

SEQ ID NO: 122066 - DNA, 38 bp, Artificial Sequence
  primer
gtaaaacgacggccagtgatatggtcctgctctcaggg

SEQ ID NO: 122067 - DNA, 38 bp, Artificial Sequence
  primer
gtaaaacgacggccagtttcatgtctctcaccagtgcc

SEQ ID NO: 122068 - DNA, 37 bp, Artificial Sequence
  primer
gtaaaacgacggccagtcagctggatcagagacgagg

SEQ ID NO: 122069 - DNA, 38 bp, Artificial Sequence
  primer
gtaaaacgacggccagtcaagaccttcaggccacagag

SEQ ID NO: 122070 - DNA, 38 bp, Artificial Sequence
  primer
gtaaaacgacggccagttccctcaaagctagttgcctc

SEQ ID NO: 122071 - DNA, 38 bp, Artificial Sequence
  primer
gtaaaacgacggccagtggccagccacgttatagagag

SEQ ID NO: 122072 - DNA, 38 bp, Artificial Sequence
  primer
gtaaaacgacggccagtctaatgcacacaaagcctccc

SEQ ID NO: 122073 - DNA, 21 bp, Artificial Sequence
  primer
aggcactgggttgtaagttgg

SEQ ID NO: 122074 - DNA, 38 bp, Artificial Sequence
  primer
gtaaaacgacggccagtcctgtatgacacctgcattcc

SEQ ID NO: 122075 - DNA, 20 bp, Artificial Sequence
  primer
atagggcagtaccaggcagg

SEQ ID NO: 122076 - DNA, 38 bp, Artificial Sequence
  primer
gtaaaacgacggccagtcccatatgctcccatttacag

SEQ ID NO: 122077 - DNA, 21 bp, Artificial Sequence
  primer
aggaaggataggacagggtgg

SEQ ID NO: 122078 - DNA, 38 bp, Artificial Sequence
  primer
gtaaaacgacggccagtcacttctgtctcctgccatcc

SEQ ID NO: 122079 - DNA, 21 bp, Artificial Sequence
  primer
caggttctggaagacgctgag

SEQ ID NO: 122080 - DNA, 21 bp, Artificial Sequence
  primer
agtactccctcaggcccaaag

SEQ ID NO: 122081 - DNA, 21 bp, Artificial Sequence
  primer
tcaagaagggtgcacagagac

SEQ ID NO: 122082 - DNA, 21 bp, Artificial Sequence
  primer
agcctgagagaagggacagtg

SEQ ID NO: 122083 - DNA, 21 bp, Artificial Sequence
  primer
agcacaccctactgcatctcg

SEQ ID NO: 122084 - DNA, 39 bp, Artificial Sequence
  primer
gtaaaacgacggccagtgggatagaactgctagggcatt

SEQ ID NO: 122085 - DNA, 38 bp, Artificial Sequence
  primer
gtaaaacgacggccagtctctagggtgtggagggactg

SEQ ID NO: 122086 - DNA, 21 bp, Artificial Sequence
  primer
ttcctcagctccgtctctttc

SEQ ID NO: 122087 - DNA, 21 bp, Artificial Sequence
  primer
aaacactgcctccagctcttg

SEQ ID NO: 122088 - DNA, 21 bp, Artificial Sequence
  primer
taggtttgcgggagtcatatc

SEQ ID NO: 122089 - DNA, 38 bp, Artificial Sequence
  primer
gtaaaacgacggccagtcatgtagaccttctgggaggg

SEQ ID NO: 122090 - DNA, 38 bp, Artificial Sequence
  primer
gtaaaacgacggccagttcctccaactgtgtgttgtgg

SEQ ID NO: 122091 - DNA, 21 bp, Artificial Sequence
  primer
tacccggtctttccctaatcc

SEQ ID NO: 122092 - DNA, 38 bp, Artificial Sequence
  primer
gtaaaacgacggccagtgttcctcaagagtggctttgg

SEQ ID NO: 122093 - DNA, 38 bp, Artificial Sequence
  primer
gtaaaacgacggccagtctggactcatctctccttccc

SEQ ID NO: 122094 - DNA, 21 bp, Artificial Sequence
  primer
agaaagggaccctagtccacc

SEQ ID NO: 122095 - DNA, 23 bp, Artificial Sequence
  primer
gctggttcacatattctgaaagg

SEQ ID NO: 122096 - DNA, 21 bp, Artificial Sequence
  primer
cttgatgccagcagaagtcag

SEQ ID NO: 122097 - DNA, 38 bp, Artificial Sequence
  primer
gtaaaacgacggccagttccacaacttcgggataggag

SEQ ID NO: 122098 - DNA, 38 bp, Artificial Sequence; identical to SEQ ID NO: 122071
  primer

SEQ ID NO: 122099 - DNA, 24 bp, Artificial Sequence
  primer
ttgaattgtacggcatactctacg

SEQ ID NO: 122100 - DNA, 27 bp, Artificial Sequence
  primer
acatattaaacaaattctaagccaagg

SEQ ID NO: 122101 - DNA, 40 bp, Artificial Sequence
  primer
gtaaaacgacggccagtttgggatcacaaatttacctcag

SEQ ID NO: 122102 - DNA, 23 bp, Artificial Sequence
  primer
aaagtcacaatgcttgggaataa

SEQ ID NO: 122103 - DNA, 41 bp, Artificial Sequence
  primer
gtaaaacgacggccagtaaatatgatgaccacacagtcagg

SEQ ID NO: 122104 - DNA, 24 bp, Artificial Sequence
  primer
tctatctgtctggaaagttctggc

SEQ ID NO: 122105 - DNA, 22 bp, Artificial Sequence
  primer
ttggaaaggacacactcaacag

SEQ ID NO: 122106 - DNA, 38 bp, Artificial Sequence
  primer
gtaaaacgacggccagttccgttcctgtggtaacgaag

SEQ ID NO: 122107 - DNA, 28 bp, Artificial Sequence
  primer
gctaaacttcaccaataagtaggtttgt

SEQ ID NO: 122108 - DNA, 44 bp, Artificial Sequence
  primer
gtaaaacgacggccagttgaagccacactaaatagctataatga

SEQ ID NO: 122109 - DNA, 22 bp, Artificial Sequence
  primer
aaagtcacactttccaagagcc

SEQ ID NO: 122110 - DNA, 23 bp, Artificial Sequence
  primer
ggagaaattaggcaagtccaaca

SEQ ID NO: 122111 - DNA, 38 bp, Artificial Sequence
  primer
gtaaaacgacggccagttctgaagtcccatcaaactgg

SEQ ID NO: 122112 - DNA, 23 bp, Artificial Sequence
  primer
ttgttcccaaattctttcatgtc

SEQ ID NO: 122113 - DNA, 22 bp, Artificial Sequence
  primer
ccgaaatatcattctgtggtgc

SEQ ID NO: 122114 - DNA, 40 bp, Artificial Sequence
  primer
gtaaaacgacggccagttgaaatttctcaatgatgaatgc

SEQ ID NO: 122115 - DNA, 20 bp, Artificial Sequence
  primer
ctgtcggtaaagtccatgcc

SEQ ID NO: 122116 - DNA, 28 bp, Artificial Sequence
  primer
gagattgagaatctagtctattcttccc

SEQ ID NO: 122117 - DNA, 38 bp, Artificial Sequence
  primer
gtaaaacgacggccagtcaacagatccaactggaccac

SEQ ID NO: 122118 - DNA, 21 bp, Artificial Sequence
  primer
acaacagtgtggcagacttgc

SEQ ID NO: 122119 - DNA, 38 bp, Artificial Sequence
  primer
gtaaaacgacggccagttctaggaaggagctgaggagg

SEQ ID NO: 122120 - DNA, 21 bp, Artificial Sequence
  primer
tcttgatgcatttggaccatc

SEQ ID NO: 122121 - DNA, 21 bp, Artificial Sequence
  primer
tatcatcccaattgtcctggc

SEQ ID NO: 122122 - DNA, 46 bp, Artificial Sequence
  primer
gtaaaacgacggccagtcaagtttaacgccttataaacgtaacata

SEQ ID NO: 122123 - DNA, 21 bp, Artificial Sequence
  primer
gggaatccaggtgatgtctac

SEQ ID NO: 122124 - DNA, 19 bp, Artificial Sequence
  primer
gcccaggctggagtacagt

SEQ ID NO: 122125 - DNA, 22 bp, Artificial Sequence
  primer
tttccctctaaccacaagttcc

SEQ ID NO: 122126 - DNA, 36 bp, Artificial Sequence
  primer
gtaaaacgacggccagtcctttccctggagcagatg

SEQ ID NO: 122127 - DNA, 18 bp, Artificial Sequence
  primer
ataacccgagcctgaccg

SEQ ID NO: 122128 - DNA, 38 bp, Artificial Sequence
  primer
gtaaaacgacggccagtcagcagaaggtagccctgaag

SEQ ID NO: 122129 - DNA, 38 bp, Artificial Sequence
  primer
gtaaaacgacggccagtcttgggtcatcatcaaggagg

SEQ ID NO: 122130 - DNA, 21 bp, Artificial Sequence
  primer
cctgaggtgtttgttcactgg

SEQ ID NO: 122131 - DNA, 38 bp, Artificial Sequence
  primer
gtaaaacgacggccagtgagaaagcatggctgttaggg

SEQ ID NO: 122132 - DNA, 22 bp, Artificial Sequence
  primer
gaggtacacaggctccactgtc

SEQ ID NO: 122133 - DNA, 38 bp, Artificial Sequence
  primer
gtaaaacgacggccagtaggactggacgtaagggtcac

SEQ ID NO: 122134 - DNA, 21 bp, Artificial Sequence
  primer
atgttgctcgagtccacagtc

SEQ ID NO: 122135 - DNA, 38 bp, Artificial Sequence
  primer
gtaaaacgacggccagttggatggaggatgtgttaagc

SEQ ID NO: 122136 - DNA, 21 bp, Artificial Sequence
  primer
ggagccttcttctttcttggg

SEQ ID NO: 122137 - DNA, 39 bp, Artificial Sequence
  primer
gtaaaacgacggccagtcactgctgtatgagacagtgcc

SEQ ID NO: 122138 - DNA, 38 bp, Artificial Sequence
  primer
gtaaaacgacggccagtcccacgtctagggcagaatag

SEQ ID NO: 122139 - DNA, 39 bp, Artificial Sequence
  primer
gtaaaacgacggccagtgatctcacaaccacaggtctcc

SEQ ID NO: 122140 - DNA, 38 bp, Artificial Sequence
  primer
gtaaaacgacggccagttctgcaggccctagcattatc

SEQ ID NO: 122141 - DNA, 20 bp, Artificial Sequence
  primer
ccagctgggagtgattcttg

SEQ ID NO: 122142 - DNA, 21 bp, Artificial Sequence
  primer
tgcattcttgagtcccaagtg

SEQ ID NO: 122143 - DNA, 40 bp, Artificial Sequence
  primer
gtaaaacgacggccagttgacatttatcccatcactgacc

SEQ ID NO: 122144 - DNA, 20 bp, Artificial Sequence
  primer
acactccctgggaagtttgg

SEQ ID NO: 122145 - DNA, 21 bp, Artificial Sequence
  primer
agcacaggaccctgcttctac

SEQ ID NO: 122146 - DNA, 37 bp, Artificial Sequence
  primer
gtaaaacgacggccagttctgtggcctggttcctaac

SEQ ID NO: 122147 - DNA, 20 bp, Artificial Sequence
  primer
aagagaccactggctgctcc

SEQ ID NO: 122148 - DNA, 38 bp, Artificial Sequence
  primer
gtaaaacgacggccagtgaagtgaagggaaggcagaac

SEQ ID NO: 122149 - DNA, 21 bp, Artificial Sequence
  primer
agattgattgcaccattgcac

SEQ ID NO: 122150 - DNA, 38 bp, Artificial Sequence
  primer
gtaaaacgacggccagtctattccaggcccactctctc

SEQ ID NO: 122151 - DNA, 38 bp, Artificial Sequence
  primer
gtaaaacgacggccagtaaaggctctggctctaggatg

SEQ ID NO: 122152 - DNA, 21 bp, Artificial Sequence
  primer
aggtgatccactctctctggc

SEQ ID NO: 122153 - DNA, 41 bp, Artificial Sequence
  primer
gtaaaacgacggccagtgacagagaggcatatgatcagaga

SEQ ID NO: 122154 - DNA, 21 bp, Artificial Sequence
  primer
ttcatacccttgctcagatgc

SEQ ID NO: 122155 - DNA, 38 bp, Artificial Sequence
  primer
gtaaaacgacggccagtttgaatggaattgtctgggac

SEQ ID NO: 122156 - DNA, 35 bp, Artificial Sequence
  primer
gtaaaacgacggccagtatgggtgaagagggcagg

SEQ ID NO: 122157 - DNA, 38 bp, Artificial Sequence
  primer
gtaaaacgacggccagtttccaggtatcagcacacagg

SEQ ID NO: 122158 - DNA, 22 bp, Artificial Sequence
  primer
tgccttagagtgttcctcaatg

SEQ ID NO: 122159 - DNA, 40 bp, Artificial Sequence
  primer
gtaaaacgacggccagtcaatgaatgcaatcaaagttcaa

SEQ ID NO: 122160 - DNA, 21 bp, Artificial Sequence
  primer
ccaaagcaaatcaaccacaag

SEQ ID NO: 122161 - DNA, 20 bp, Artificial Sequence
  primer
ggaatgactttgaggagggc

SEQ ID NO: 122162 - DNA, 43 bp, Artificial Sequence
  primer
gtaaaacgacggccagttttgctatgaaactttacacaaatca

SEQ ID NO: 122163 - DNA, 38 bp, Artificial Sequence
  primer
gtaaaacgacggccagtgtgtgggtaggtttggttgtg

SEQ ID NO: 122164 - DNA, 39 bp, Artificial Sequence
  primer
gtaaaacgacggccagtggtgaaactcttcagcttccag

SEQ ID NO: 122165 - DNA, 21 bp, Artificial Sequence
  primer
tctcctgacctcatgatccac

SEQ ID NO: 122166 - DNA, 21 bp, Artificial Sequence
  primer
tacctcacaccatcatcggag

SEQ ID NO: 122167 - DNA, 21 bp, Artificial Sequence
  primer
gagcaacaattctgaccggat

SEQ ID NO: 122168 - DNA, 18 bp, Artificial Sequence
  primer
gaatggcgtgaacccagg

SEQ ID NO: 122169 - DNA, 21 bp, Artificial Sequence
  primer
cccatggcatcctgtaagtag

SEQ ID NO: 122170 - DNA, 39 bp, Artificial Sequence
  primer
gtaaaacgacggccagtcatttcagagatggtaccaggg

SEQ ID NO: 122171 - DNA, 42 bp, Artificial Sequence
  primer
gtaaaacgacggccagtaagtaagaaagttggcttgagaagg

SEQ ID NO: 122172 - DNA, 40 bp, Artificial Sequence
  primer
gtaaaacgacggccagtttcacaagctttgtttaacggac

SEQ ID NO: 122173 - DNA, 38 bp, Artificial Sequence
  primer
gtaaaacgacggccagtagactgtatccgtcccagctc

SEQ ID NO: 122174 - DNA, 39 bp, Artificial Sequence
  primer
gtaaaacgacggccagttctaggcagacagttgtgaagc

SEQ ID NO: 122175 - DNA, 21 bp, Artificial Sequence
  primer
tttggcacctagtcaattcaa

SEQ ID NO: 122176 - DNA, 21 bp, Artificial Sequence
  primer
aggcaaatggtagaaccaagg

SEQ ID NO: 122177 - DNA, 27 bp, Artificial Sequence
  primer
taactgctttaggaaattaggcttatc

SEQ ID NO: 122178 - DNA, 39 bp, Artificial Sequence
  primer
gtaaaacgacggccagtcaaagaggcgttcatatgttcc

SEQ ID NO: 122179 - DNA, 21 bp, Artificial Sequence
  primer
tgtttgtggtcctttccacag

SEQ ID NO: 122180 - DNA, 39 bp, Artificial Sequence
  primer
gtaaaacgacggccagtggcatcacattgatttgagcta

SEQ ID NO: 122181 - DNA, 38 bp, Artificial Sequence
  primer
gtaaaacgacggccagttaactcactgttggcaaaggc

SEQ ID NO: 122182 - DNA, 42 bp, Artificial Sequence
  primer
gtaaaacgacggccagtcagctatctggcaatttctattctg

SEQ ID NO: 122183 - DNA, 38 bp, Artificial Sequence
  primer
gtaaaacgacggccagtaggtagtctgggtgctgaagg

SEQ ID NO: 122184 - DNA, 38 bp, Artificial Sequence
  primer
gtaaaacgacggccagtgaccaccagagaaagagaggg

SEQ ID NO: 122185 - DNA, 38 bp, Artificial Sequence
  primer
gtaaaacgacggccagtaatccactaacccacaccctg

SEQ ID NO: 122186 - DNA, 21 bp, Artificial Sequence
  primer
ggaactcagacctccttgcac

SEQ ID NO: 122187 - DNA, 37 bp, Artificial Sequence
  primer
gtaaaacgacggccagtacactgggacatgaccctcc

SEQ ID NO: 122188 - DNA, 38 bp, Artificial Sequence
  primer
gtaaaacgacggccagttcctcttggaagggattcaac

SEQ ID NO: 122189 - DNA, 37 bp, Artificial Sequence
  primer
gtaaaacgacggccagtccacacaggaaggagaaggg

SEQ ID NO: 122190 - DNA, 21 bp, Artificial Sequence
  primer
ttggaactgaagctcaaccac

SEQ ID NO: 122191 - DNA, 38 bp, Artificial Sequence
  primer
gtaaaacgacggccagtgagatggaaggaaatgggtga

SEQ ID NO: 122192 - DNA, 21 bp, Artificial Sequence
  primer
agccactgtgtctggtctttg

SEQ ID NO: 122193 - DNA, 38 bp, Artificial Sequence
  primer
gtaaaacgacggccagttaaagaaagctgaaggtgccc

SEQ ID NO: 122194 - DNA, 21 bp, Artificial Sequence
  primer
ctacaggcacgtagcaagctc

SEQ ID NO: 122195 - DNA, 20 bp, Artificial Sequence
  primer
gctatcactgctgctccctg

SEQ ID NO: 122196 - DNA, 21 bp, Artificial Sequence
  primer
cgtcctgcaatctgtcttagg

SEQ ID NO: 122197 - DNA, 38 bp, Artificial Sequence
  primer
gtaaaacgacggccagttctctggcacagttcttgagc

SEQ ID NO: 122198 - DNA, 20 bp, Artificial Sequence
  primer
gagcttgtgctcattggagg

SEQ ID NO: 122199 - DNA, 38 bp, Artificial Sequence
  primer
gtaaaacgacggccagtatccaggacttgtggttggac

SEQ ID NO: 122200 - DNA, 21 bp, Artificial Sequence
  primer
atccaggttgtagatgccagc

SEQ ID NO: 122201 - DNA, 21 bp, Artificial Sequence
  primer
gacaggcagactcacagcaag

SEQ ID NO: 122202 - DNA, 20 bp, Artificial Sequence
  primer
agacgttgtctggagaaggg

SEQ ID NO: 122203 - DNA, 38 bp, Artificial Sequence
  primer
gtaaaacgacggccagttctctttgatcctgcggagag

SEQ ID NO: 122204 - DNA, 21 bp, Artificial Sequence
  primer
cacttcacgtactccagcagc

SEQ ID NO: 122205 - DNA, 36 bp, Artificial Sequence
  primer
gtaaaacgacggccagtatgctgcagtggtgacctg

SEQ ID NO: 122206 - DNA, 38 bp, Artificial Sequence
  primer
gtaaaacgacggccagtcaacaaccctctagaccctgc

SEQ ID NO: 122207 - DNA, 22 bp, Artificial Sequence
  primer
cccagatgtgatgatgacagac

SEQ ID NO: 122208 - DNA, 36 bp, Artificial Sequence
  primer
gtaaaacgacggccagtgatctcagcaggactgggc

SEQ ID NO: 122209 - DNA, 21 bp, Artificial Sequence
  primer
agtctgtctgaatcccgaacc

SEQ ID NO: 122210 - DNA, 21 bp, Artificial Sequence
  primer
ttatgctgcctctgacacacc

SEQ ID NO: 122211 - DNA, 38 bp, Artificial Sequence
  primer
gtaaaacgacggccagtcaggaaacctgtcaccatcag

SEQ ID NO: 122212 - DNA, 21 bp, Artificial Sequence
  primer
ggagaccgagacgcaagttag

SEQ ID NO: 122213 - DNA, 21 bp, Artificial Sequence
  primer
aggatgctgtgtctgagttgg

SEQ ID NO: 122214 - DNA, 38 bp, Artificial Sequence
  primer
gtaaaacgacggccagtatacggaggatgagaagctgg

SEQ ID NO: 122215 - DNA, 20 bp, Artificial Sequence
  primer
ctgggaaatgaacgggaaac

SEQ ID NO: 122216 - DNA, 20 bp, Artificial Sequence
  primer
ccaacttctctcaccctgcc

SEQ ID NO: 122217 - DNA, 39 bp, Artificial Sequence
  primer
gtaaaacgacggccagtgattaaaggctgtggacgtgac

SEQ ID NO: 122218 - DNA, 36 bp, Artificial Sequence
  primer
gtaaaacgacggccagtcaggtccagcatctctccc

SEQ ID NO: 122219 - DNA, 20 bp, Artificial Sequence
  primer
tgttccaacgtgtgtggatg

SEQ ID NO: 122220 - DNA, 38 bp, Artificial Sequence
  primer
gtaaaacgacggccagtctgaatggcacattctcatgg

SEQ ID NO: 122221 - DNA, 21 bp, Artificial Sequence
  primer
atcaggtccttcccatatccc

SEQ ID NO: 122222 - DNA, 21 bp, Artificial Sequence
  primer
gggctgctaggttgtaagtgc

SEQ ID NO: 122223 - DNA, 37 bp, Artificial Sequence
  primer
gtaaaacgacggccagtgaccaacagggactccttcc

SEQ ID NO: 122224 - DNA, 37 bp, Artificial Sequence
  primer
gtaaaacgacggccagtaatgtgcagagagaaagcgg

SEQ ID NO: 122225 - DNA, 21 bp, Artificial Sequence
  primer
tccctttcccaacctaacaac

SEQ ID NO: 122226 - DNA, 37 bp, Artificial Sequence
  primer
gtaaaacgacggccagtagtcctgacctgtgtctgcc

SEQ ID NO: 122227 - DNA, 37 bp, Artificial Sequence
  primer
gtaaaacgacggccagtacaacagccaccttctgcac

SEQ ID NO: 122228 - DNA, 21 bp, Artificial Sequence
  primer
atgatgcatgcaaatcctcag

SEQ ID NO: 122229 - DNA, 38 bp, Artificial Sequence
  primer
gtaaaacgacggccagtctttgctttgggattctctcc

SEQ ID NO: 122230 - DNA, 38 bp, Artificial Sequence
  primer
gtaaaacgacggccagtaatctcctaatgcttggtgcc

SEQ ID NO: 122231 - DNA, 39 bp, Artificial Sequence
  primer
gtaaaacgacggccagtcaggcaggactacatgtctgtg

SEQ ID NO: 122232 - DNA, 21 bp, Artificial Sequence
  primer
ggaaggtcaaagaggtggaag

SEQ ID NO: 122233 - DNA, 21 bp, Artificial Sequence
  primer
tgtgtcatcgcgtagtgtcag

SEQ ID NO: 122234 - DNA, 21 bp, Artificial Sequence
  primer
accaaaggtgatgtagggagc

SEQ ID NO: 122235 - DNA, 28 bp, Artificial Sequence
  primer
tggtgaatacatatttatagctggatgt

SEQ ID NO: 122236 - DNA, 22 bp, Artificial Sequence
  primer
tgatgcttatatgccaatccac

SEQ ID NO: 122237 - DNA, 38 bp, Artificial Sequence
  primer
gtaaaacgacggccagtcagacgttaagtaggcggaaa

SEQ ID NO: 122238 - DNA, 21 bp, Artificial Sequence
  primer
tctgttatttggaagccctgg

SEQ ID NO: 122239 - DNA, 22 bp, Artificial Sequence
  primer
aaacgaacagaaatgaggttgc

SEQ ID NO: 122240 - DNA, 21 bp, Artificial Sequence
  primer
tctttctttggtagaagcccg

SEQ ID NO: 122241 - DNA, 38 bp, Artificial Sequence
  primer
gtaaaacgacggccagtaacttgcctcagaggtttccc

SEQ ID NO: 122242 - DNA, 38 bp, Artificial Sequence
  primer
gtaaaacgacggccagtacataagcagcatcgtaacgg

SEQ ID NO: 122243 - DNA, 38 bp, Artificial Sequence
  primer
gtaaaacgacggccagtcaacgtcttccttgccctatc

SEQ ID NO: 122244 - DNA, 40 bp, Artificial Sequence
  primer
gtaaaacgacggccagtgggaagtacacatcctctccttg

SEQ ID NO: 122245 - DNA, 38 bp, Artificial Sequence
  primer
gtaaaacgacggccagtctgtggcttgctttgtttcag

SEQ ID NO: 122246 - DNA, 20 bp, Artificial Sequence
  primer
gagctcgtcttgtgacaggg

SEQ ID NO: 122247 - DNA, 38 bp, Artificial Sequence
  primer
gtaaaacgacggccagtcttctggtccaccgtacaatc

SEQ ID NO: 122248 - DNA, 20 bp, Artificial Sequence
  primer
acccaagaccatcatcctgc

SEQ ID NO: 122249 - DNA, 24 bp, Artificial Sequence
  primer
tcattgtacccatgatgaactctc

SEQ ID NO: 122250 - DNA, 22 bp, Artificial Sequence
  primer
ggaaagagaatcgcaggaaatc

SEQ ID NO: 122251 - DNA, 23 bp, Artificial Sequence
  primer
tggagaatttagaatccacagcc

SEQ ID NO: 122252 - DNA, 26 bp, Artificial Sequence
  primer
attactattggttggttggttgtaaa

SEQ ID NO: 122253 - DNA, 44 bp, Artificial Sequence
  primer
gtaaaacgacggccagtttagaatctgagatgtagaaatgctgt

SEQ ID NO: 122254 - DNA, 27 bp, Artificial Sequence
  primer
gggtgctagtttatagaattcagagtc

SEQ ID NO: 122255 - DNA, 38 bp, Artificial Sequence
  primer
gtaaaacgacggccagtctgagtctgtgggctctctcc

SEQ ID NO: 122256 - DNA, 38 bp, Artificial Sequence
  primer
gtaaaacgacggccagttcatatgggcaaagttcgttc

SEQ ID NO: 122257 - DNA, 21 bp, Artificial Sequence
  primer
taaatcctggcctgcagattc

SEQ ID NO: 122258 - DNA, 21 bp, Artificial Sequence
  primer
ccctgggaaagtcatttcatc

SEQ ID NO: 122259 - DNA, 20 bp, Artificial Sequence
  primer
atgaagccatcagcaaccac

SEQ ID NO: 122260 - DNA, 38 bp, Artificial Sequence
  primer
gtaaaacgacggccagtcctgcagagttagggacacac

SEQ ID NO: 122261 - DNA, 21 bp, Artificial Sequence
  primer
ttgcatagacctgcaatttcc

SEQ ID NO: 122262 - DNA, 40 bp, Artificial Sequence
  primer
gtaaaacgacggccagtaaacaaccaatactttctgctgc

SEQ ID NO: 122263 - DNA, 43 bp, Artificial Sequence
  primer
gtaaaacgacggccagttgatccaagtttctcttccataagtt

SEQ ID NO: 122264 - DNA, 21 bp, Artificial Sequence
  primer
aaggactccaaagttcagccc

SEQ ID NO: 122265 - DNA, 38 bp, Artificial Sequence
  primer
gtaaaacgacggccagtcttccttcactgagttctgcg

SEQ ID NO: 122266 - DNA, 20 bp, Artificial Sequence
  primer
ccctcgcacgtcttagtttc

SEQ ID NO: 122267 - DNA, 38 bp, Artificial Sequence
  primer
gtaaaacgacggccagtcatgtgaccaggaaggatcag

SEQ ID NO: 122268 - DNA, 38 bp, Artificial Sequence
  primer
gtaaaacgacggccagtatagacgtccacacccaaacc

SEQ ID NO: 122269 - DNA, 39 bp, Artificial Sequence
  primer
gtaaaacgacggccagtgcccttattgactctgtcctcc

SEQ ID NO: 122270 - DNA, 24 bp, Artificial Sequence
  primer
tgcaatagaatgggatgttaaagg

SEQ ID NO: 122271 - DNA, 40 bp, Artificial Sequence
  primer
gtaaaacgacggccagtgagacaccctccactgactacag

SEQ ID NO: 122272 - DNA, 22 bp, Artificial Sequence
  primer
ggacagaactctggctttcttg

SEQ ID NO: 122273 - DNA, 37 bp, Artificial Sequence
  primer
gtaaaacgacggccagtcactttccgacctcctcctc

SEQ ID NO: 122274 - DNA, 38 bp, Artificial Sequence
  primer
gtaaaacgacggccagttaaggctgcagaaatccaacc

SEQ ID NO: 122275 - DNA, 37 bp, Artificial Sequence
  primer
gtaaaacgacggccagtagtaccttcagggcccacag

SEQ ID NO: 122276 - DNA, 21 bp, Artificial Sequence
  primer
gaccctcctccacagcaatac

SEQ ID NO: 122277 - DNA, 40 bp, Artificial Sequence
  primer
gtaaaacgacggccagttgagaaacacatggatcagagaa

SEQ ID NO: 122278 - DNA, 22 bp, Artificial Sequence
  primer
cagttggcacaaggaaagattc

SEQ ID NO: 122279 - DNA, 21 bp, Artificial Sequence
  primer
tttatgagcctggccatcttt

SEQ ID NO: 122280 - DNA, 38 bp, Artificial Sequence
  primer
gtaaaacgacggccagtctcaccagactctctcatccg

SEQ ID NO: 122281 - DNA, 38 bp, Artificial Sequence
  primer
gtaaaacgacggccagtagcctggcacaatgtagatcc

SEQ ID NO: 122282 - DNA, 22 bp, Artificial Sequence
  primer
tcagcatcagtggtagacttgc

SEQ ID NO: 122283 - DNA, 21 bp, Artificial Sequence
  primer
gtgggtaagggtgtggatacg

SEQ ID NO: 122284 - DNA, 38 bp, Artificial Sequence
  primer
gtaaaacgacggccagttgtgaaacgtatgctgaagcc

SEQ ID NO: 122285 - DNA, 44 bp, Artificial Sequence
  primer
gtaaaacgacggccagttgacaactcacagtaagacatctaagc

SEQ ID NO: 122286 - DNA, 38 bp, Artificial Sequence
  primer
gtaaaacgacggccagttagatggcatttgggtgtctg

SEQ ID NO: 122287 - DNA, 21 bp, Artificial Sequence
  primer
aaagcttctgtttgagcctgg

SEQ ID NO: 122288 - DNA, 21 bp, Artificial Sequence
  primer
taatcctagcatccctgtggc

SEQ ID NO: 122289 - DNA, 39 bp, Artificial Sequence
  primer
gtaaaacgacggccagttgcaccatcagttaaagactgc

SEQ ID NO: 122290 - DNA, 36 bp, Artificial Sequence
  primer
gtaaaacgacggccagtataagcctccacacctgcc

SEQ ID NO: 122291 - DNA, 38 bp, Artificial Sequence
  primer
gtaaaacgacggccagtgcgtgcaacacaaatatcagg

SEQ ID NO: 122292 - DNA, 21 bp, Artificial Sequence
  primer
tttccaaattccttcaccacc

SEQ ID NO: 122293 - DNA, 38 bp, Artificial Sequence
  primer
gtaaaacgacggccagtcaaacatcaagtgcagccaac

SEQ ID NO: 122294 - DNA, 21 bp, Artificial Sequence
  primer
gcaagccacacagcattagag

SEQ ID NO: 122295 - DNA, 40 bp, Artificial Sequence
  primer
gtaaaacgacggccagtgacaacatttggtaggttcgatg

SEQ ID NO: 122296 - DNA, 37 bp, Artificial Sequence
  primer
gtaaaacgacggccagtcattcgcttgacccattcac

SEQ ID NO: 122297 - DNA, 21 bp, Artificial Sequence
  primer
cagcacagccaggatatgaac

SEQ ID NO: 122298 - DNA, 19 bp, Artificial Sequence
  primer
ccacagcatagtgcttgcc

SEQ ID NO: 122299 - DNA, 38 bp, Artificial Sequence
  primer
gtaaaacgacggccagttgagtctcaacaaccagcaca

SEQ ID NO: 122300 - DNA, 25 bp, Artificial Sequence
  primer
cacagttcctctgtgttctaaggtg

SEQ ID NO: 122301 - DNA, 22 bp, Artificial Sequence
  primer
ttgcaatttgtcaatatgcgtt

SEQ ID NO: 122302 - DNA, 21 bp, Artificial Sequence
  primer
gtaagggtgggttgtcctgag

SEQ ID NO: 122303 - DNA, 41 bp, Artificial Sequence
  primer
gtaaaacgacggccagtgctgtctaacaatctaggctgtgc

SEQ ID NO: 122304 - DNA, 19 bp, Artificial Sequence
  primer
cttgcctcagtctcccagg

SEQ ID NO: 122305 - DNA, 38 bp, Artificial Sequence
  primer
gtaaaacgacggccagtcaacatctgggatcaaggaac

SEQ ID NO: 122306 - DNA, 20 bp, Artificial Sequence
  primer
atgacaaatgcacaggagcc

SEQ ID NO: 122307 - DNA, 21 bp, Artificial Sequence
  primer
ttatccggtccctctcctacc

SEQ ID NO: 122308 - DNA, 21 bp, Artificial Sequence
  primer
tccatgcacactatttgaggg

SEQ ID NO: 122309 - DNA, 19 bp, Artificial Sequence
  primer
catcactcaggtgttgggc

SEQ ID NO: 122310 - DNA, 40 bp, Artificial Sequence
  primer
gtaaaacgacggccagtttcaatgaagcatttagctcagg

SEQ ID NO: 122311 - DNA, 20 bp, Artificial Sequence
  primer
aggtctccagtgcttgaggg

SEQ ID NO: 122312 - DNA, 21 bp, Artificial Sequence
  primer
gtcagacccaatgcttgttcc

SEQ ID NO: 122313 - DNA, 21 bp, Artificial Sequence
  primer
gaagggagacagtgtcaaggc

SEQ ID NO: 122314 - DNA, 22 bp, Artificial Sequence
  primer
ctgacgtgccatcactacagtc

SEQ ID NO: 122315 - DNA, 38 bp, Artificial Sequence
  primer
gtaaaacgacggccagtctgcaggtaccgtttcatgtc

SEQ ID NO: 122316 - DNA, 39 bp, Artificial Sequence
  primer
gtaaaacgacggccagtgctggagcttaaacttgaatgg

SEQ ID NO: 122317 - DNA, 38 bp, Artificial Sequence
  primer
gtaaaacgacggccagtgtcacctctacctcctccgac

SEQ ID NO: 122318 - DNA, 21 bp, Artificial Sequence
  primer
ccacagagacagggaatagcc

SEQ ID NO: 122319 - DNA, 21 bp, Artificial Sequence
  primer
ctgatatgtgggctgctatcc

SEQ ID NO: 122320 - DNA, 21 bp, Artificial Sequence
  primer
atgactgacttccactttgcc

SEQ ID NO: 122321 - DNA, 37 bp, Artificial Sequence
  primer
gtaaaacgacggccagtcatagacctctgccagctcc

SEQ ID NO: 122322 - DNA, 19 bp, Artificial Sequence
  primer
atgctgtcgacacacctgg

SEQ ID NO: 122323 - DNA, 38 bp, Artificial Sequence
  primer
gtaaaacgacggccagttcaccttcctttaggctgtgg

SEQ ID NO: 122324 - DNA, 38 bp, Artificial Sequence
  primer
gtaaaacgacggccagtaacaaacccatcacatgttgc

SEQ ID NO: 122325 - DNA, 23 bp, Artificial Sequence
  primer
tgggccctatcttatgtatggag

SEQ ID NO: 122326 - DNA, 39 bp, Artificial Sequence
  primer
gtaaaacgacggccagtcccaacccatctttccattaag

SEQ ID NO: 122327 - DNA, 21 bp, Artificial Sequence
  primer
agttcatcttctgtgggtggg

SEQ ID NO: 122328 - DNA, 38 bp, Artificial Sequence
  primer
gtaaaacgacggccagtgatagagtttgtggcgatggg

SEQ ID NO: 122329 - DNA, 20 bp, Artificial Sequence
  primer
cggatggttggagtaggaaa

SEQ ID NO: 122330 - DNA, 21 bp, Artificial Sequence
  primer
gtgacttagggcacggatctc

SEQ ID NO: 122331 - DNA, 40 bp, Artificial Sequence
  primer
gtaaaacgacggccagtgacaagttacgaagttacggcag

SEQ ID NO: 122332 - DNA, 23 bp, Artificial Sequence
  primer
tgaaacaaagcatgctaaatcaa

SEQ ID NO: 122333 - DNA, 23 bp, Artificial Sequence
  primer
aatgctgattcacaaacatttcc

SEQ ID NO: 122334 - DNA, 40 bp, Artificial Sequence
  primer
gtaaaacgacggccagtaaagcaactatctgtcttcaagc

SEQ ID NO: 122335 - DNA, 26 bp, Artificial Sequence
  primer
gcatgactttcttaagatctgatggt

SEQ ID NO: 122336 - DNA, 43 bp, Artificial Sequence
  primer
gtaaaacgacggccagttcacaggctataaatttaagagcaaa

SEQ ID NO: 122337 - DNA, 38 bp, Artificial Sequence
  primer
gtaaaacgacggccagtccatcggccagaatttacttt

SEQ ID NO: 122338 - DNA, 22 bp, Artificial Sequence
  primer
ctaacctcagcaactcagagcc

SEQ ID NO: 122339 - DNA, 44 bp, Artificial Sequence
  primer
gtaaaacgacggccagtcatccactactaggacaaattctcttc

SEQ ID NO: 122340 - DNA, 41 bp, Artificial Sequence
  primer
gtaaaacgacggccagtaaatgagggaagacaccaagtaaa

SEQ ID NO: 122341 - DNA, 38 bp, Artificial Sequence
  primer
gtaaaacgacggccagtcacccaggatctttccaactc

SEQ ID NO: 122342 - DNA, 21 bp, Artificial Sequence
  primer
ttgccttgactggtctcaaac

SEQ ID NO: 122343 - DNA, 20 bp, Artificial Sequence
  primer
aaagcaacactccagttggg

SEQ ID NO: 122344 - DNA, 21 bp, Artificial Sequence
  primer
caatcgggagagagttcatcc

SEQ ID NO: 122345 - DNA, 21 bp, Artificial Sequence
  primer
ttggaagtgataaaggcaggg

SEQ ID NO: 122346 - DNA, 39 bp, Artificial Sequence
  primer
gtaaaacgacggccagttgcaaagatcagtatcaggcac

SEQ ID NO: 122347 - DNA, 24 bp, Artificial Sequence
  primer
aagtgacgaagaacaacttccatc

SEQ ID NO: 122348 - DNA, 19 bp, Artificial Sequence
  primer
caggacgccagtgtgtgac

SEQ ID NO: 122349 - DNA, 38 bp, Artificial Sequence
  primer
gtaaaacgacggccagtagaaacacaggtgtgtgggtg

SEQ ID NO: 122350 - DNA, 21 bp, Artificial Sequence
  primer
aatgtccctgtcgttctctgc

SEQ ID NO: 122351 - DNA, 38 bp, Artificial Sequence
  primer
gtaaaacgacggccagtagtccagggtacatggtgagg

SEQ ID NO: 122352 - DNA, 38 bp, Artificial Sequence
  primer
gtaaaacgacggccagtgccaaagtcacacagcttcac

SEQ ID NO: 122353 - DNA, 20 bp, Artificial Sequence
  primer
gaacacttgtggaccaaggc

SEQ ID NO: 122354 - DNA, 38 bp, Artificial Sequence
  primer
gtaaaacgacggccagtcctctcagcacagtcctagcc

SEQ ID NO: 122355 - DNA, 21 bp, Artificial Sequence
  primer
aacagttgttgggtttgggac

SEQ ID NO: 122356 - DNA, 37 bp, Artificial Sequence
  primer
gtaaaacgacggccagtagagcccaggaaggactctg

SEQ ID NO: 122357 - DNA, 40 bp, Artificial Sequence
  primer
gtaaaacgacggccagttggagagacaaagtaggtcctga

SEQ ID NO: 122358 - DNA, 38 bp, Artificial Sequence
  primer
gtaaaacgacggccagtacatctacttccgtctggccc

SEQ ID NO: 122359 - DNA, 38 bp, Artificial Sequence
  primer
gtaaaacgacggccagtgcaacggatttagacattgcc

SEQ ID NO: 122360 - DNA, 20 bp, Artificial Sequence
  primer
tccttacccactgccacaag

SEQ ID NO: 122361 - DNA, 38 bp, Artificial Sequence
  primer
gtaaaacgacggccagtagttgtgcaggaaagaggagc

SEQ ID NO: 122362 - DNA, 21 bp, Artificial Sequence
  primer
ggagaaagtgcatctcacctg

SEQ ID NO: 122363 - DNA, 23 bp, Artificial Sequence
  primer
ggaagtgctctgagatatggacc

SEQ ID NO: 122364 - DNA, 24 bp, Artificial Sequence
  primer
tttaaattacctgcattccagagg

SEQ ID NO: 122365 - DNA, 38 bp, Artificial Sequence
  primer
gtaaaacgacggccagtaggttcaaagaaagggcgaag

SEQ ID NO: 122366 - DNA, 21 bp, Artificial Sequence
  primer
gggtctggatttgggttaagg

SEQ ID NO: 122367 - DNA, 35 bp, Artificial Sequence
  primer
gtaaaacgacggccagtgactcccgtcagggaagc

SEQ ID NO: 122368 - DNA, 22 bp, Artificial Sequence
  primer
tcctctcttgatcccattcttc

SEQ ID NO: 122369 - DNA, 21 bp, Artificial Sequence
  primer
ctcaggaaactgaccacctcc

SEQ ID NO: 122370 - DNA, 21 bp, Artificial Sequence
  primer
ggctcctctctagaccacctg

SEQ ID NO: 122371 - DNA, 37 bp, Artificial Sequence
  primer
gtaaaacgacggccagtacaacccaggaaagaaaggg

SEQ ID NO: 122372 - DNA, 21 bp, Artificial Sequence
  primer
acatgatgggacctgtgtttg

SEQ ID NO: 122373 - DNA, 21 bp, Artificial Sequence
  primer
ccatggaaagaaagaacctgg

SEQ ID NO: 122374 - DNA, 21 bp, Artificial Sequence
  primer
tcctcatggcttcagagactg

SEQ ID NO: 122375 - DNA, 21 bp, Artificial Sequence
  primer
gaatgtggcatgtgcagaaac

SEQ ID NO: 122376 - DNA, 21 bp, Artificial Sequence
  primer
ccgagctcagtacggtgtaac

SEQ ID NO: 122377 - DNA, 37 bp, Artificial Sequence
  primer
gtaaaacgacggccagttaggctgcaagctcagaagg

SEQ ID NO: 122378 - DNA, 38 bp, Artificial Sequence
  primer
gtaaaacgacggccagtgggaaagaaatgtgctggttg

SEQ ID NO: 122379 - DNA, 22 bp, Artificial Sequence
  primer
cccagagtggaagttagaggag

SEQ ID NO: 122380 - DNA, 21 bp, Artificial Sequence
  primer
ctccatgcgtctaggtcactg

SEQ ID NO: 122381 - DNA, 21 bp, Artificial Sequence
  primer
tacaggaacacatcgctaggc

SEQ ID NO: 122382 - DNA, 39 bp, Artificial Sequence
  primer
gtaaaacgacggccagtcaccactcatctttgctactgg

SEQ ID NO: 122383 - DNA, 38 bp, Artificial Sequence
  primer
gtaaaacgacggccagtatgccattctccagctacacg

SEQ ID NO: 122384 - DNA, 20 bp, Artificial Sequence
  primer
ttggcacaagtctggaggtc

SEQ ID NO: 122385 - DNA, 23 bp, Artificial Sequence
  primer
catcagccatgattatcttccag

SEQ ID NO: 122386 - DNA, 21 bp, Artificial Sequence
  primer
cctagagcacgacaccatcac

SEQ ID NO: 122387 - DNA, 21 bp, Artificial Sequence
  primer
gtaagagaggcaacagcctgc

SEQ ID NO: 122388 - DNA, 21 bp, Artificial Sequence
  primer
ggcatcaagctctaattgtgg

SEQ ID NO: 122389 - DNA, 35 bp, Artificial Sequence
  primer
gtaaaacgacggccagttggcttgggaggctcttc

SEQ ID NO: 122390 - DNA, 19 bp, Artificial Sequence
  primer
gtgagggagggagaggtgc

SEQ ID NO: 122391 - DNA, 39 bp, Artificial Sequence
  primer
gtaaaacgacggccagtttggattctagagcccatgttc

SEQ ID NO: 122392 - DNA, 21 bp, Artificial Sequence
  primer
ttacttccaacatgtccctgc

SEQ ID NO: 122393 - DNA, 38 bp, Artificial Sequence
  primer
gtaaaacgacggccagtctctccacctctcagtgctcc

SEQ ID NO: 122394 - DNA, 39 bp, Artificial Sequence
  primer
gtaaaacgacggccagttggaggtggaaagtgtgttagc

SEQ ID NO: 122395 - DNA, 38 bp, Artificial Sequence
  primer
gtaaaacgacggccagtcatcacagtggcagagactgg

SEQ ID NO: 122396 - DNA, 38 bp, Artificial Sequence
  primer
gtaaaacgacggccagtgaggtcaagtgggtcgaaatg

SEQ ID NO: 122397 - DNA, 38 bp, Artificial Sequence
  primer
gtaaaacgacggccagtgttcagcggtactggtgtgtc

SEQ ID NO: 122398 - DNA, 38 bp, Artificial Sequence
  primer
gtaaaacgacggccagtgatggagagccatgagtgagg

SEQ ID NO: 122399 - DNA, 21 bp, Artificial Sequence
  primer
gggaccttagctttccagctc

SEQ ID NO: 122400 - DNA, 21 bp, Artificial Sequence
  primer
aaagatccaagggctattccc

SEQ ID NO: 122401 - DNA, 38 bp, Artificial Sequence
  primer
gtaaaacgacggccagtagggagagagttgctgagtgg

SEQ ID NO: 122402 - DNA, 38 bp, Artificial Sequence
  primer
gtaaaacgacggccagtgtgctcaattacgtagcaggc

SEQ ID NO: 122403 - DNA, 21 bp, Artificial Sequence
  primer
ggatcaacctgtacccacctc

SEQ ID NO: 122404 - DNA, 37 bp, Artificial Sequence
  primer
gtaaaacgacggccagtgtactgagcagcagcaaggg

SEQ ID NO: 122405 - DNA, 21 bp, Artificial Sequence
  primer
aaagaaagctggttgctgagg

SEQ ID NO: 122406 - DNA, 21 bp, Artificial Sequence
  primer
cacacagcaagtgtcatggag

SEQ ID NO: 122407 - DNA, 38 bp, Artificial Sequence
  primer
gtaaaacgacggccagtaggaggagagtctgcttcagg

SEQ ID NO: 122408 - DNA, 21 bp, Artificial Sequence
  primer
ccagtttagggaaagagccag

SEQ ID NO: 122409 - DNA, 38 bp, Artificial Sequence
  primer
gtaaaacgacggccagtaaaccgtccctgctagactcc

SEQ ID NO: 122410 - DNA, 21 bp, Artificial Sequence
  primer
tgtgaagtactggacgaagcc

SEQ ID NO: 122411 - DNA, 20 bp, Artificial Sequence
  primer
atcctctcactcagcctccc

SEQ ID NO: 122412 - DNA, 20 bp, Artificial Sequence
  primer
gaagagatgcaaggacgcac

SEQ ID NO: 122413 - DNA, 25 bp, Artificial Sequence
  primer
cagaatcacatgcttcactcttatg

SEQ ID NO: 122414 - DNA, 21 bp, Artificial Sequence
  primer
cccagaaattcaagaccaacc

SEQ ID NO: 122415 - DNA, 37 bp, Artificial Sequence
  primer
gtaaaacgacggccagtggtttcaccactggaagcag

SEQ ID NO: 122416 - DNA, 24 bp, Artificial Sequence
  primer
tgtgtttcctcacttcaaacaaag

SEQ ID NO: 122417 - DNA, 21 bp, Artificial Sequence
  primer
tctggattcaaatacctgggc

SEQ ID NO: 122418 - DNA, 21 bp, Artificial Sequence
  primer
tcaagggcctacaatactccc

SEQ ID NO: 122419 - DNA, 21 bp, Artificial Sequence
  primer
gcgtgaggcataactctatgg

SEQ ID NO: 122420 - DNA, 20 bp, Artificial Sequence
  primer
gcctgaacccagacacaaag

SEQ ID NO: 122421 - DNA, 21 bp, Artificial Sequence
  primer
tcccattcaggtaaatgccag

SEQ ID NO: 122422 - DNA, 38 bp, Artificial Sequence
  primer
gtaaaacgacggccagttcccattcaggtaaatgccag

SEQ ID NO: 122423 - DNA, 20 bp, Artificial Sequence
  primer
gagggagagcctgtctcaaa

SEQ ID NO: 122424 - DNA, 19 bp, Artificial Sequence
  primer
cagggctcaagcaatcctc

SEQ ID NO: 122425 - DNA, 22 bp, Artificial Sequence
  primer
aactaaccttccaaatgcgttg

SEQ ID NO: 122426 - DNA, 20 bp, Artificial Sequence
  primer
gaacccagaaggtggaggtc

SEQ ID NO: 122427 - DNA, 43 bp, Artificial Sequence
  primer
gtaaaacgacggccagtggcttaagactgtcattgctattatg

SEQ ID NO: 122428 - DNA, 20 bp, Artificial Sequence
  primer
ttctgctcgccagaaatcac

SEQ ID NO: 122429 - DNA, 21 bp, Artificial Sequence
  primer
gctgagaggaactgaaatggg

SEQ ID NO: 122430 - DNA, 22 bp, Artificial Sequence
  primer
tccaaatccattgacattagcc

SEQ ID NO: 122431 - DNA, 38 bp, Artificial Sequence
  primer
gtaaaacgacggccagtctgcttgacgcaagagttagg

SEQ ID NO: 122432 - DNA, 19 bp, Artificial Sequence
  primer
agccaagaagaggcaaagc

SEQ ID NO: 122433 - DNA, 36 bp, Artificial Sequence
  primer
gtaaaacgacggccagtgcctggaacacaggctctc

SEQ ID NO: 122434 - DNA, 37 bp, Artificial Sequence
  primer
gtaaaacgacggccagtcagatgatccacccaccttg

SEQ ID NO: 122435 - DNA, 37 bp, Artificial Sequence
  primer
gtaaaacgacggccagttagggtctggcacagagcag

SEQ ID NO: 122436 - DNA, 22 bp, Artificial Sequence
  primer
ccacttcctcaggacatattca

SEQ ID NO: 122437 - DNA, 22 bp, Artificial Sequence
  primer
tgatgacagtatttggcctgtg

SEQ ID NO: 122438 - DNA, 19 bp, Artificial Sequence
  primer
agggtcaaagcggtgtttg

SEQ ID NO: 122439 - DNA, 42 bp, Artificial Sequence
  primer
gtaaaacgacggccagttctgttgttctattgatcactttcc

SEQ ID NO: 122440 - DNA, 40 bp, Artificial Sequence
  primer
gtaaaacgacggccagtccaatcagaccaactctgacaag

SEQ ID NO: 122441 - DNA, 27 bp, Artificial Sequence
  primer
aattctaattcaatgaacaatgaggac

SEQ ID NO: 122442 - DNA, 24 bp, Artificial Sequence
  primer
aaacactggcaattggaaacttag

SEQ ID NO: 122443 - DNA, 40 bp, Artificial Sequence
  primer
gtaaaacgacggccagtagtgtctttctgatgaatgtcca

SEQ ID NO: 122444 - DNA, 21 bp, Artificial Sequence
  primer
actagttctggagctgaccgc

SEQ ID NO: 122445 - DNA, 21 bp, Artificial Sequence
  primer
acgcacagtggtagaacgagt

SEQ ID NO: 122446 - DNA, 38 bp, Artificial Sequence
  primer
gtaaaacgacggccagtgtcagtccctggtaccctcag

SEQ ID NO: 122447 - DNA, 21 bp, Artificial Sequence
  primer
tcccacccaagaatggactac

SEQ ID NO: 122448 - DNA, 21 bp, Artificial Sequence
  primer
actaagaactgcccacttccc

SEQ ID NO: 122449 - DNA, 22 bp, Artificial Sequence
  primer
aaagcttattcccagagatggc

SEQ ID NO: 122450 - DNA, 38 bp, Artificial Sequence
  primer
gtaaaacgacggccagtctgcagacaagagcgaaacct

SEQ ID NO: 122451 - DNA, 20 bp, Artificial Sequence
  primer
caggctgggatttctgagtg

SEQ ID NO: 122452 - DNA, 38 bp, Artificial Sequence
  primer
gtaaaacgacggccagtgactgctggctgacttaaggg

SEQ ID NO: 122453 - DNA, 21 bp, Artificial Sequence
  primer
gggaagccctccaccttatag

SEQ ID NO: 122454 - DNA, 39 bp, Artificial Sequence
  primer
gtaaaacgacggccagttcagagcatgaagtgaaacacc

SEQ ID NO: 122455 - DNA, 39 bp, Artificial Sequence
  primer
gtaaaacgacggccagtccagtttgggtgaagtaagtcc

SEQ ID NO: 122456 - DNA, 21 bp, Artificial Sequence
  primer
tgcctgatcttgaactccacc

SEQ ID NO: 122457 - DNA, 21 bp, Artificial Sequence
  primer
tgaagagccattcaaacaacg

SEQ ID NO: 122458 - DNA, 20 bp, Artificial Sequence
  primer
aggttgtgataccgccaatg

SEQ ID NO: 122459 - DNA, 21 bp, Artificial Sequence
  primer
agtgtttcgaagctcctctgc

SEQ ID NO: 122460 - DNA, 38 bp, Artificial Sequence
  primer
gtaaaacgacggccagtttgtgcagctgagatttcctc

SEQ ID NO: 122461 - DNA, 39 bp, Artificial Sequence
  primer
gtaaaacgacggccagtgcctaggaaatccagctagtcc

SEQ ID NO: 122462 - DNA, 38 bp, Artificial Sequence
  primer
gtaaaacgacggccagtcgctaccagctctttgcttac

SEQ ID NO: 122463 - DNA, 21 bp, Artificial Sequence
  primer
acccttctgtcgcttcatttg

SEQ ID NO: 122464 - DNA, 36 bp, Artificial Sequence
  primer
gtaaaacgacggccagtccagtgcttgtcagccttg

SEQ ID NO: 122465 - DNA, 37 bp, Artificial Sequence
  primer
gtaaaacgacggccagtctgccaccatacacattccc

SEQ ID NO: 122466 - DNA, 21 bp, Artificial Sequence
  primer
ggaatgatgtttcagccactg

SEQ ID NO: 122467 - DNA, 38 bp, Artificial Sequence
  primer
gtaaaacgacggccagtggcctctgtgctagaggtgac

SEQ ID NO: 122468 - DNA, 21 bp, Artificial Sequence
  primer
aactgcttgaacttgaccctg

SEQ ID NO: 122469 - DNA, 39 bp, Artificial Sequence
  primer
gtaaaacgacggccagtcctcagaagttacaggcacagg

SEQ ID NO: 122470 - DNA, 39 bp, Artificial Sequence
  primer
gtaaaacgacggccagtttcaccagcaatttcttcacag

SEQ ID NO: 122471 - DNA, 39 bp, Artificial Sequence
  primer
gtaaaacgacggccagtgatgcatttctaaagctggtgg

SEQ ID NO: 122472 - DNA, 39 bp, Artificial Sequence
  primer
gtaaaacgacggccagttctgattatccaatggtgggtc

SEQ ID NO: 122473 - DNA, 38 bp, Artificial Sequence
  primer
gtaaaacgacggccagtctggaattcaaccggcttatg

SEQ ID NO: 122474 - DNA, 40 bp, Artificial Sequence
  primer
gtaaaacgacggccagtttctgaaagcatgggtgatagtc

SEQ ID NO: 122475 - DNA, 44 bp, Artificial Sequence
  primer
gtaaaacgacggccagttctgtaggtaaactgagggttactagc

SEQ ID NO: 122476 - DNA, 37 bp, Artificial Sequence
  primer
gtaaaacgacggccagtaggccatagaaccacaagcc

SEQ ID NO: 122477 - DNA, 41 bp, Artificial Sequence
  primer
gtaaaacgacggccagttttcagtgatttaaatttggcaac

SEQ ID NO: 122478 - DNA, 38 bp, Artificial Sequence
  primer
gtaaaacgacggccagtgcacacatctgtagtcccacc

SEQ ID NO: 122479 - DNA, 38 bp, Artificial Sequence
  primer
gtaaaacgacggccagtctcacacatgggaattcttgc

SEQ ID NO: 122480 - DNA, 41 bp, Artificial Sequence
  primer
gtaaaacgacggccagttccaatacactgataacctcatgc

SEQ ID NO: 122481 - DNA, 39 bp, Artificial Sequence
  primer
gtaaaacgacggccagtttcctggttaaagtcagcaacc

SEQ ID NO: 122482 - DNA, 21 bp, Artificial Sequence
  primer
gccacaaggagtaggctagtg

SEQ ID NO: 122483 - DNA, 21 bp, Artificial Sequence
  primer
cttgatttgctgatggcagtc

SEQ ID NO: 122484 - DNA, 40 bp, Artificial Sequence
  primer
gtaaaacgacggccagtccttgatacaggcttgatgtgtc

SEQ ID NO: 122485 - DNA, 37 bp, Artificial Sequence
  primer
gtaaaacgacggccagtaccaagcactttggcacttg

SEQ ID NO: 122486 - DNA, 39 bp, Artificial Sequence
  primer
gtaaaacgacggccagtgcctgggtcataaagaaagacc

SEQ ID NO: 122487 - DNA, 38 bp, Artificial Sequence
  primer
gtaaaacgacggccagtaacttggccacagccatagac

SEQ ID NO: 122488 - DNA, 25 bp, Artificial Sequence
  primer
ggactgatttcatcaccctattctc

SEQ ID NO: 122489 - DNA, 39 bp, Artificial Sequence
  primer
gtaaaacgacggccagttcaccacctacaactcccattc

SEQ ID NO: 122490 - DNA, 37 bp, Artificial Sequence
  primer
gtaaaacgacggccagtgctgggtggtagaggtggtg

SEQ ID NO: 122491 - DNA, 38 bp, Artificial Sequence
  primer
gtaaaacgacggccagtagcaaaggcagtttgcacttc

SEQ ID NO: 122492 - DNA, 40 bp, Artificial Sequence
  primer
gtaaaacgacggccagttcttaaatgctgagacttctccc

SEQ ID NO: 122493 - DNA, 38 bp, Artificial Sequence
  primer
gtaaaacgacggccagttttagctcagaagccgagagg

SEQ ID NO: 122494 - DNA, 23 bp, Artificial Sequence
  primer
gtgtgtatgagtgtgagtctcgg

SEQ ID NO: 122495 - DNA, 41 bp, Artificial Sequence
  primer
gtaaaacgacggccagtggctctacctcacacaatcacatc

SEQ ID NO: 122496 - DNA, 43 bp, Artificial Sequence
  primer
gtaaaacgacggccagtaggtccttaaagtctttcataaatgg

SEQ ID NO: 122497 - DNA, 20 bp, Artificial Sequence
  primer
tggagtcatgatgccacttg

SEQ ID NO: 122498 - DNA, 41 bp, Artificial Sequence
  primer
gtaaaacgacggccagtcctcaggattgtaaggactttgtg

SEQ ID NO: 122499 - DNA, 38 bp, Artificial Sequence
  primer
gtaaaacgacggccagtaatacccacccttcaaacacc

SEQ ID NO: 122500 - DNA, 20 bp, Artificial Sequence
  primer
agccctaacatgagcagggt

SEQ ID NO: 122501 - DNA, 27 bp, Artificial Sequence
  primer
gctttcctatttctatcaaatttagtg

SEQ ID NO: 122502 - DNA, 27 bp, Artificial Sequence
  primer
ggtgattcaactatagaataaagccct

SEQ ID NO: 122503 - DNA, 21 bp, Artificial Sequence
  primer
gtgccttgtcaagaatccacc

SEQ ID NO: 122504 - DNA, 21 bp, Artificial Sequence
  primer
caaactcagctaccacccacc

SEQ ID NO: 122505 - DNA, 19 bp, Artificial Sequence
  primer
caccatgcatcacatttgg

SEQ ID NO: 122506 - DNA, 21 bp, Artificial Sequence
  primer
gcaaaggcaggaaagaggtag

SEQ ID NO: 122507 - DNA, 21 bp, Artificial Sequence
  primer
catcaaatagctgatgggcag

SEQ ID NO: 122508 - DNA, 38 bp, Artificial Sequence
  primer
gtaaaacgacggccagtactgtgagccttctccactgc

SEQ ID NO: 122509 - DNA, 38 bp, Artificial Sequence
  primer
gtaaaacgacggccagtaagcaaagaggctcagaatgg

SEQ ID NO: 122510 - DNA, 38 bp, Artificial Sequence
  primer
gtaaaacgacggccagtagcagcttaacaaggagggag

SEQ ID NO: 122511 - DNA, 21 bp, Artificial Sequence
  primer
actagttgggtcaggtcagcc

SEQ ID NO: 122512 - DNA, 21 bp, Artificial Sequence
  primer
accctcacagtggtcagaacc

SEQ ID NO: 122513 - DNA, 22 bp, Artificial Sequence
  primer
gctgctattaacctcccactcc

SEQ ID NO: 122514 - DNA, 37 bp, Artificial Sequence
  primer
gtaaaacgacggccagtttggccatggtctcaaactc

SEQ ID NO: 122515 - DNA, 38 bp, Artificial Sequence
  primer
gtaaaacgacggccagtggaaactggttctcaagaggg

SEQ ID NO: 122516 - DNA, 19 bp, Artificial Sequence
  primer
ctgggcaacagagagaccc

SEQ ID NO: 122517 - DNA, 21 bp, Artificial Sequence
  primer
ctgcttccacaacctcctacc

SEQ ID NO: 122518 - DNA, 38 bp, Artificial Sequence
  primer
gtaaaacgacggccagtgcttctcaggaggatcacagg

SEQ ID NO: 122519 - DNA, 38 bp, Artificial Sequence
  primer
gtaaaacgacggccagtattctccagccagttgtggtg

SEQ ID NO: 122520 - DNA, 21 bp, Artificial Sequence
  primer
acatactgcctagctccaggg

SEQ ID NO: 122521 - DNA, 38 bp, Artificial Sequence
  primer
gtaaaacgacggccagtggccacatagttagccagcag

SEQ ID NO: 122522 - DNA, 21 bp, Artificial Sequence
  primer
acaagaccaccatcactcagc

SEQ ID NO: 122523 - DNA, 38 bp, Artificial Sequence
  primer
gtaaaacgacggccagtcatccgcatactgaaggacac

SEQ ID NO: 122524 - DNA, 22 bp, Artificial Sequence
  primer
ccagcctgggtaataaagtgag

SEQ ID NO: 122525 - DNA, 38 bp, Artificial Sequence
  primer
gtaaaacgacggccagtcgtgctgctacaaacttcagc

SEQ ID NO: 122526 - DNA, 38 bp, Artificial Sequence
  primer
gtaaaacgacggccagtgaggtattattgaggcgcagg

SEQ ID NO: 122527 - DNA, 21 bp, Artificial Sequence
  primer
ggagctattccacagggacac

SEQ ID NO: 122528 - DNA, 20 bp, Artificial Sequence
  primer
ttactgcttgtgctttgccc

SEQ ID NO: 122529 - DNA, 37 bp, Artificial Sequence
  primer
gtaaaacgacggccagtaacccagcctggaaagacag

SEQ ID NO: 122530 - DNA, 21 bp, Artificial Sequence
  primer
atttcaagtgatcctcggtgc

SEQ ID NO: 122531 - DNA, 40 bp, Artificial Sequence
  primer
gtaaaacgacggccagtcaaaccttcctgatgtaagatgc

SEQ ID NO: 122532 - DNA, 38 bp, Artificial Sequence
  primer
gtaaaacgacggccagtccctcaacacagaatgtgagc

SEQ ID NO: 122533 - DNA, 21 bp, Artificial Sequence
  primer
aagtggctttagcactgaccc

SEQ ID NO: 122534 - DNA, 38 bp, Artificial Sequence
  primer
gtaaaacgacggccagtagctcctgagctcaagcaatc

SEQ ID NO: 122535 - DNA, 21 bp, Artificial Sequence
  primer
ccagccaggtatatgcagaag

SEQ ID NO: 122536 - DNA, 21 bp, Artificial Sequence
  primer
tctcaggtttctctgcccttc

SEQ ID NO: 122537 - DNA, 21 bp, Artificial Sequence
  primer
atagaaggtgggctgcaacag

SEQ ID NO: 122538 - DNA, 21 bp, Artificial Sequence
  primer
agaggctctcaagtcccaaag

SEQ ID NO: 122539 - DNA, 21 bp, Artificial Sequence
  primer
tcagacctgggaaagaacctg

SEQ ID NO: 122540 - DNA, 23 bp, Artificial Sequence
  primer
tcatgccgtgtctttaaatgttc

SEQ ID NO: 122541 - DNA, 18 bp, Artificial Sequence
  primer
ttgagggcctctggaagg

SEQ ID NO: 122542 - DNA, 21 bp, Artificial Sequence
  primer
atgttgagtgggagccatttc

SEQ ID NO: 122543 - DNA, 18 bp, Artificial Sequence
  primer
ctcggacaggctcacgtc

SEQ ID NO: 122544 - DNA, 21 bp, Artificial Sequence
  primer
actaccaggatctggcagcac

SEQ ID NO: 122545 - DNA, 37 bp, Artificial Sequence
  primer
gtaaaacgacggccagtctttccgttgacctttgtgc

SEQ ID NO: 122546 - DNA, 19 bp, Artificial Sequence
  primer
caaggccaatcctcacagc

SEQ ID NO: 122547 - DNA, 35 bp, Artificial Sequence
  primer
gtaaaacgacggccagtaggcctttggcctcactg

SEQ ID NO: 122548 - DNA, 19 bp, Artificial Sequence
  primer
gcagccgttaggaacatgg

SEQ ID NO: 122549 - DNA, 19 bp, Artificial Sequence
  primer
ctactcactgccggtggac

SEQ ID NO: 122550 - DNA, 22 bp, Artificial Sequence
  primer
ccatgtagaagaggaaggaccc

SEQ ID NO: 122551 - DNA, 20 bp, Artificial Sequence
  primer
gactggtgacagtgcaggtg

SEQ ID NO: 122552 - DNA, 18 bp, Artificial Sequence
  primer
aaatgggaggtcccgagg

SEQ ID NO: 122553 - DNA, 21 bp, Artificial Sequence
  primer
ttatagggaggaaggaggctg

SEQ ID NO: 122554 - DNA, 38 bp, Artificial Sequence
  primer
gtaaaacgacggccagtgccaagagacaggaggatgta

SEQ ID NO: 122555 - DNA, 36 bp, Artificial Sequence
  primer
gtaaaacgacggccagtggtcagggagggtttccag

SEQ ID NO: 122556 - DNA, 38 bp, Artificial Sequence
  primer
gtaaaacgacggccagtgccatgtgtcaactccttctc

SEQ ID NO: 122557 - DNA, 21 bp, Artificial Sequence
  primer
attccaatgggtagagccagc

SEQ ID NO: 122558 - DNA, 38 bp, Artificial Sequence
  primer
gtaaaacgacggccagtcccactatttctcccatgaca

SEQ ID NO: 122559 - DNA, 21 bp, Artificial Sequence
  primer
tttgactaggcttcatcaccc

SEQ ID NO: 122560 - DNA, 39 bp, Artificial Sequence
  primer
gtaaaacgacggccagtggagtgggtagatcgtatctgg

SEQ ID NO: 122561 - DNA, 38 bp, Artificial Sequence
  primer
gtaaaacgacggccagtgccagctgtcacataggtttg

SEQ ID NO: 122562 - DNA, 23 bp, Artificial Sequence
  primer
tgtatgcaggagacagaatttgg

SEQ ID NO: 122563 - DNA, 21 bp, Artificial Sequence
  primer
tcagaatagaacagggcatcc

SEQ ID NO: 122564 - DNA, 38 bp, Artificial Sequence
  primer
gtaaaacgacggccagtgtgtgccaaacaggccagtag

SEQ ID NO: 122565 - DNA, 38 bp, Artificial Sequence
  primer
gtaaaacgacggccagtctgcctcccataatctgttcc

SEQ ID NO: 122566 - DNA, 38 bp, Artificial Sequence
  primer
gtaaaacgacggccagttaggcacagctcatggacctc

SEQ ID NO: 122567 - DNA, 37 bp, Artificial Sequence
  primer
gtaaaacgacggccagtacccaggactttgttcccac

SEQ ID NO: 122568 - DNA, 44 bp, Artificial Sequence
  primer
gtaaaacgacggccagtttcaacattcttcttaatatcacgcta

SEQ ID NO: 122569 - DNA, 20 bp, Artificial Sequence
  primer
cccaaatcacttcaccctcc

SEQ ID NO: 122570 - DNA, 37 bp, Artificial Sequence
  primer
gtaaaacgacggccagtaggctcctgacacactggag

SEQ ID NO: 122571 - DNA, 38 bp, Artificial Sequence
  primer
gtaaaacgacggccagtccagattgttagcctcaagcg

SEQ ID NO: 122572 - DNA, 21 bp, Artificial Sequence
  primer
aggactgtgactgtggtgctg

SEQ ID NO: 122573 - DNA, 21 bp, Artificial Sequence
  primer
aggcagtttcacatgtcttgg

SEQ ID NO: 122574 - DNA, 20 bp, Artificial Sequence
  primer
acagcgacagcgatgagaag

SEQ ID NO: 122575 - DNA, 20 bp, Artificial Sequence
  primer
gctgtgctaccgtcactgag

SEQ ID NO: 122576 - DNA, 37 bp, Artificial Sequence
  primer
gtaaaacgacggccagtacacgttcccagcttctgac

SEQ ID NO: 122577 - DNA, 37 bp, Artificial Sequence
  primer
gtaaaacgacggccagtgaattcctagggcttctgcc

SEQ ID NO: 122578 - DNA, 38 bp, Artificial Sequence
  primer
gtaaaacgacggccagtcacagcttgtgggtgtctcac

SEQ ID NO: 122579 - DNA, 21 bp, Artificial Sequence
  primer
ttgtctcatgacccagtggtg

SEQ ID NO: 122580 - DNA, 21 bp, Artificial Sequence
  primer
agaagcacagccattgggtag

SEQ ID NO: 122581 - DNA, 19 bp, Artificial Sequence
  primer
cagggatgggctcattagg

SEQ ID NO: 122582 - DNA, 37 bp, Artificial Sequence
  primer
gtaaaacgacggccagtgaggtctccacctcggtctg

SEQ ID NO: 122583 - DNA, 38 bp, Artificial Sequence
  primer
gtaaaacgacggccagtggaaactgtggaaggtatggg

SEQ ID NO: 122584 - DNA, 37 bp, Artificial Sequence
  primer
gtaaaacgacggccagtctgatccctgcttgtgaagg

SEQ ID NO: 122585 - DNA, 20 bp, Artificial Sequence
  primer
ctctcacgaaactggttccc

SEQ ID NO: 122586 - DNA, 39 bp, Artificial Sequence
  primer
gtaaaacgacggccagttcaattgaacagctctgtaccc

SEQ ID NO: 122587 - DNA, 22 bp, Artificial Sequence
  primer
ttccagataatggaagtctggg

SEQ ID NO: 122588 - DNA, 38 bp, Artificial Sequence
  primer
gtaaaacgacggccagtggccaacaacggtttctactc

SEQ ID NO: 122589 - DNA, 24 bp, Artificial Sequence
  primer
aactgaatcctactgcccttcttt

SEQ ID NO: 122590 - DNA, 40 bp, Artificial Sequence
  primer
gtaaaacgacggccagtaggtcagttgaaatgtaacacgg

SEQ ID NO: 122591 - DNA, 38 bp, Artificial Sequence
  primer
gtaaaacgacggccagtctcttggcttcctaaagtggg

SEQ ID NO: 122592 - DNA, 23 bp, Artificial Sequence
  primer
aatgatttaaaggcacaggaagc

SEQ ID NO: 122593 - DNA, 24 bp, Artificial Sequence
  primer
caatgaatctctcttcaaacaagc

SEQ ID NO: 122594 - DNA, 25 bp, Artificial Sequence
  primer
aaaggctttaaccatcataatcacc

SEQ ID NO: 122595 - DNA, 38 bp, Artificial Sequence
  primer
gtaaaacgacggccagtagtctcttgggcatcgagttg

SEQ ID NO: 122596 - DNA, 38 bp, Artificial Sequence
  primer
gtaaaacgacggccagtatcatgtgaggttggaagtgg

SEQ ID NO: 122597 - DNA, 44 bp, Artificial Sequence
  primer
gtaaaacgacggccagttgcaccattaaagcttaacagtaagag

SEQ ID NO: 122598 - DNA, 21 bp, Artificial Sequence
  primer
attctgccatcagagtcaggg

SEQ ID NO: 122599 - DNA, 21 bp, Artificial Sequence
  primer
ccttggagtcagtagggatgg

SEQ ID NO: 122600 - DNA, 24 bp, Artificial Sequence
  primer
caagaactcaaggtggtaccaata

SEQ ID NO: 122601 - DNA, 22 bp, Artificial Sequence
  primer
caaaccaggtctagcaaatccc

SEQ ID NO: 122602 - DNA, 21 bp, Artificial Sequence
  primer
ttcttcgacatcactcttggg

SEQ ID NO: 122603 - DNA, 22 bp, Artificial Sequence
  primer
tgggtgaagtgtcacattgttc

SEQ ID NO: 122604 - DNA, 21 bp, Artificial Sequence
  primer
ggacctgaaccctccctagac

SEQ ID NO: 122605 - DNA, 21 bp, Artificial Sequence
  primer
gacatgacctgggtttccttc

SEQ ID NO: 122606 - DNA, 23 bp, Artificial Sequence
  primer
tccatggtaaggatatgcctaga

SEQ ID NO: 122607 - DNA, 21 bp, Artificial Sequence
  primer
tcatctcctgactcccaatcc

SEQ ID NO: 122608 - DNA, 40 bp, Artificial Sequence
  primer
gtaaaacgacggccagtcttaactcttcacattccaaccc

SEQ ID NO: 122609 - DNA, 37 bp, Artificial Sequence
  primer
gtaaaacgacggccagtaaattgcaccctccttcctc

SEQ ID NO: 122610 - DNA, 19 bp, Artificial Sequence
  primer
tctgcagatggagtgaggg

SEQ ID NO: 122611 - DNA, 36 bp, Artificial Sequence
  primer
gtaaaacgacggccagtgtgcccagcctcttactgc

SEQ ID NO: 122612 - DNA, 21 bp, Artificial Sequence
  primer
atgaaccctgagggataaggc

SEQ ID NO: 122613 - DNA, 21 bp, Artificial Sequence
  primer
ttaccaacaactgaagcagcc

SEQ ID NO: 122614 - DNA, 38 bp, Artificial Sequence
  primer
gtaaaacgacggccagttgagaatgaagaggagctggg

SEQ ID NO: 122615 - DNA, 21 bp, Artificial Sequence
  primer
agccacagctagaggaaggag

SEQ ID NO: 122616 - DNA, 21 bp, Artificial Sequence
  primer
agtaaatgctgaatggtcccg

SEQ ID NO: 122617 - DNA, 21 bp, Artificial Sequence
  primer
acccttgggagaaacagtgag

SEQ ID NO: 122618 - DNA, 21 bp, Artificial Sequence
  primer
gacacaggagtgaagaggctg

SEQ ID NO: 122619 - DNA, 20 bp, Artificial Sequence
  primer
ctggaagctggaatgtgctc

SEQ ID NO: 122620 - DNA, 38 bp, Artificial Sequence
  primer
gtaaaacgacggccagttcctggctattcatttccgag

SEQ ID NO: 122621 - DNA, 21 bp, Artificial Sequence
  primer
tgagtgtctatggcatggagg

SEQ ID NO: 122622 - DNA, 38 bp, Artificial Sequence
  primer
gtaaaacgacggccagtgggccaaaggtaagggtagag

SEQ ID NO: 122623 - DNA, 21 bp, Artificial Sequence
  primer
ttccctgtcagagcataaggg

SEQ ID NO: 122624 - DNA, 38 bp, Artificial Sequence
  primer
gtaaaacgacggccagtcacacaatgactgctgtgtgc

SEQ ID NO: 122625 - DNA, 38 bp, Artificial Sequence
  primer
gtaaaacgacggccagtgtctgagtggaagagggcatc

SEQ ID NO: 122626 - DNA, 19 bp, Artificial Sequence
  primer
gtctgagcctcttgccctg

SEQ ID NO: 122627 - DNA, 37 bp, Artificial Sequence
  primer
gtaaaacgacggccagtgggacacagaggcaacagag

SEQ ID NO: 122628 - DNA, 38 bp, Artificial Sequence
  primer
gtaaaacgacggccagttttcacagatgaagtgacggg

SEQ ID NO: 122629 - DNA, 21 bp, Artificial Sequence
  primer
cttacccatagggagcaaggg

SEQ ID NO: 122630 - DNA, 38 bp, Artificial Sequence
  primer
gtaaaacgacggccagtattatccagccctacccgttc

SEQ ID NO: 122631 - DNA, 38 bp, Artificial Sequence
  primer
gtaaaacgacggccagttagctatgtggagggtctggg

SEQ ID NO: 122632 - DNA, 38 bp, Artificial Sequence
  primer
gtaaaacgacggccagtgactacaggtgctggtcctgg

SEQ ID NO: 122633 - DNA, 21 bp, Artificial Sequence
  primer
ctatggaagagcaactgcgac

SEQ ID NO: 122634 - DNA, 20 bp, Artificial Sequence
  primer
tcctcctgctcttgcttcag

SEQ ID NO: 122635 - DNA, 21 bp, Artificial Sequence
  primer
actcgctttaccctagtcccg

SEQ ID NO: 122636 - DNA, 41 bp, Artificial Sequence
  primer
gtaaaacgacggccagttgagcaatttccataatctgaagt

SEQ ID NO: 122637 - DNA, 18 bp, Artificial Sequence
  primer
catgggtggcataggtgc

SEQ ID NO: 122638 - DNA, 21 bp, Artificial Sequence
  primer
tctggcaggaaagaactttgg

SEQ ID NO: 122639 - DNA, 38 bp, Artificial Sequence
  primer
gtaaaacgacggccagtttacttgatgctgtgctgtgc

SEQ ID NO: 122640 - DNA, 21 bp, Artificial Sequence
  primer
aaacgataatgcttaacgccc

SEQ ID NO: 122641 - DNA, 39 bp, Artificial Sequence
  primer
gtaaaacgacggccagttgccatcaccacttattcaatc

SEQ ID NO: 122642 - DNA, 39 bp, Artificial Sequence
  primer
gtaaaacgacggccagtcctgagcaacaagtactgagcc

SEQ ID NO: 122643 - DNA, 38 bp, Artificial Sequence
  primer
gtaaaacgacggccagtttgtcaggcagtttccttgtg

SEQ ID NO: 122644 - DNA, 22 bp, Artificial Sequence
  primer
tggaagatccaaattgtcaacc

SEQ ID NO: 122645 - DNA, 38 bp, Artificial Sequence
  primer
gtaaaacgacggccagtggttcatgagaacgatgcttg

SEQ ID NO: 122646 - DNA, 38 bp, Artificial Sequence
  primer
gtaaaacgacggccagtcatcagttagggctaaacggg

SEQ ID NO: 122647 - DNA, 39 bp, Artificial Sequence
  primer
gtaaaacgacggccagtccaaagttaccagggaataggg

SEQ ID NO: 122648 - DNA, 20 bp, Artificial Sequence
  primer
tgaaggaaaccagccacaag

SEQ ID NO: 122649 - DNA, 38 bp, Artificial Sequence
  primer
gtaaaacgacggccagttcaaggacaaaggtgaagcac

SEQ ID NO: 122650 - DNA, 22 bp, Artificial Sequence
  primer
tgaccttagagagacaccaggc

SEQ ID NO: 122651 - DNA, 21 bp, Artificial Sequence
  primer
ggtggtgtgcacctgtaatct

SEQ ID NO: 122652 - DNA, 21 bp, Artificial Sequence
  primer
atcaaaggcgacttcttccac

SEQ ID NO: 122653 - DNA, 21 bp, Artificial Sequence
  primer
atacacgctccagactccacc

SEQ ID NO: 122654 - DNA, 43 bp, Artificial Sequence
  primer
gtaaaacgacggccagttttagtgcagcttagaggattatgtg

SEQ ID NO: 122655 - DNA, 43 bp, Artificial Sequence
  primer
gtaaaacgacggccagtaaacagtaatctttgctgccttattt

SEQ ID NO: 122656 - DNA, 43 bp, Artificial Sequence
  primer
gtaaaacgacggccagtatgttctgaaacattatatccaactg

SEQ ID NO: 122657 - DNA, 38 bp, Artificial Sequence
  primer
gtaaaacgacggccagttggcagttcttggcttaactg

SEQ ID NO: 122658 - DNA, 44 bp, Artificial Sequence
  primer
gtaaaacgacggccagttcaaagcatttgtctttacaaaggtag

SEQ ID NO: 122659 - DNA, 38 bp, Artificial Sequence
  primer
gtaaaacgacggccagtctcctaacctggcatctggac

SEQ ID NO: 122660 - DNA, 22 bp, Artificial Sequence
  primer
gggatcattccaatcatcaaag

SEQ ID NO: 122661 - DNA, 20 bp, Artificial Sequence
  primer
tagtttggctccatgttcgg

SEQ ID NO: 122662 - DNA, 40 bp, Artificial Sequence
  primer
gtaaaacgacggccagttcaaagatgtctgcactgaaatg

SEQ ID NO: 122663 - DNA, 42 bp, Artificial Sequence
  primer
gtaaaacgacggccagtgaaccaatttggaactattcacttg

SEQ ID NO: 122664 - DNA, 38 bp, Artificial Sequence
  primer
gtaaaacgacggccagtcaccaaagattgctgtccaac

SEQ ID NO: 122665 - DNA, 38 bp, Artificial Sequence
  primer
gtaaaacgacggccagtgtgctgggaaagaattcaatg

SEQ ID NO: 122666 - DNA, 26 bp, Artificial Sequence
  primer
aaagtcagcattacatttctcacaga

SEQ ID NO: 122667 - DNA, 21 bp, Artificial Sequence
  primer
gagttggctagtgcctggttc

SEQ ID NO: 122668 - DNA, 38 bp, Artificial Sequence
  primer
gtaaaacgacggccagtagcaccatagcagcatcacag

SEQ ID NO: 122669 - DNA, 21 bp, Artificial Sequence
  primer
gacaggtaagtgggagggatg

SEQ ID NO: 122670 - DNA, 37 bp, Artificial Sequence
  primer
gtaaaacgacggccagttctgacttcgtgatccaccc

SEQ ID NO: 122671 - DNA, 21 bp, Artificial Sequence
  primer
gttccagtgctcacacagagg

SEQ ID NO: 122672 - DNA, 27 bp, Artificial Sequence
  primer
ttggtaccttgtctcatacatacaatc

SEQ ID NO: 122673 - DNA, 37 bp, Artificial Sequence
  primer
gtaaaacgacggccagtcatccctcccaaatctccac

SEQ ID NO: 122674 - DNA, 21 bp, Artificial Sequence
  primer
ccttccctgaaatcagattcg

SEQ ID NO: 122675 - DNA, 37 bp, Artificial Sequence
  primer
gtaaaacgacggccagtataagcacctcaccggaagc

SEQ ID NO: 122676 - DNA, 38 bp, Artificial Sequence
  primer
gtaaaacgacggccagtgtaaggcagggatctgtttgg

SEQ ID NO: 122677 - DNA, 20 bp, Artificial Sequence
  primer
gcaaattcacatcattcggg

SEQ ID NO: 122678 - DNA, 43 bp, Artificial Sequence
  primer
gtaaaacgacggccagtgggttacaatcctaagcataattctc

SEQ ID NO: 122679 - DNA, 23 bp, Artificial Sequence
  primer
aatcaatggtgtcagttcctctg

SEQ ID NO: 122680 - DNA, 41 bp, Artificial Sequence
  primer
gtaaaacgacggccagtcaattcagataaatccagattggc

SEQ ID NO: 122681 - DNA, 38 bp, Artificial Sequence
  primer
gtaaaacgacggccagtgagagaatgccatgtcaaggg

SEQ ID NO: 122682 - DNA, 25 bp, Artificial Sequence
  primer
ccttgatctaccaaagcaactatcc

SEQ ID NO: 122683 - DNA, 23 bp, Artificial Sequence
  primer
tcccaaacttcccaacttcttac

SEQ ID NO: 122684 - DNA, 37 bp, Artificial Sequence
  primer
gtaaaacgacggccagtaggaggccttctcctcactg

SEQ ID NO: 122685 - DNA, 39 bp, Artificial Sequence
  primer
gtaaaacgacggccagtggctaactgctcaggaacactg

SEQ ID NO: 122686 - DNA, 38 bp, Artificial Sequence
  primer
gtaaaacgacggccagttttaaggcagtgaacggtagc

SEQ ID NO: 122687 - DNA, 39 bp, Artificial Sequence
  primer
gtaaaacgacggccagtgcttcatccctaaccatttctg

SEQ ID NO: 122688 - DNA, 21 bp, Artificial Sequence
  primer
cccataaacaagcattctggc

SEQ ID NO: 122689 - DNA, 37 bp, Artificial Sequence
  primer
gtaaaacgacggccagttttgccctcaggtgactttg

SEQ ID NO: 122690 - DNA, 21 bp, Artificial Sequence
  primer
gacccaggaatccaggctatc

SEQ ID NO: 122691 - DNA, 20 bp, Artificial Sequence
  primer
cacgtaggatggcaaggaag

SEQ ID NO: 122692 - DNA, 21 bp, Artificial Sequence
  primer
agacctcctttggatccttcc

SEQ ID NO: 122693 - DNA, 19 bp, Artificial Sequence
  primer
cagggactggatccacagg

SEQ ID NO: 122694 - DNA, 38 bp, Artificial Sequence
  primer
gtaaaacgacggccagttgacctttgccctagatagcc

SEQ ID NO: 122695 - DNA, 39 bp, Artificial Sequence
  primer
gtaaaacgacggccagttgcagcatgtgacttggtaaag

SEQ ID NO: 122696 - DNA, 21 bp, Artificial Sequence
  primer
gggcaacaagagtgaaactcc

SEQ ID NO: 122697 - DNA, 38 bp, Artificial Sequence
  primer
gtaaaacgacggccagtttctagtcctgctttcccacc

SEQ ID NO: 122698 - DNA, 25 bp, Artificial Sequence
  primer
catgaggaattcaagtactctttgg

SEQ ID NO: 122699 - DNA, 37 bp, Artificial Sequence
  primer
gtaaaacgacggccagtggtttcactttgatgcccac

SEQ ID NO: 122700 - DNA, 40 bp, Artificial Sequence
  primer
gtaaaacgacggccagtcacttcaagcaacacttgatacg

SEQ ID NO: 122701 - DNA, 38 bp, Artificial Sequence
  primer
gtaaaacgacggccagttgacacagcagccataagcac

SEQ ID NO: 122702 - DNA, 20 bp, Artificial Sequence
  primer
ccactgtgcccagcctaata

SEQ ID NO: 122703 - DNA, 26 bp, Artificial Sequence
  primer
aaagtgacagatgcaatacaaatctt

SEQ ID NO: 122704 - DNA, 40 bp, Artificial Sequence
  primer
gtaaaacgacggccagtcaccaaagaaatatgactagccc

SEQ ID NO: 122705 - DNA, 23 bp, Artificial Sequence
  primer
ggaagctggatgaagtcatttac

SEQ ID NO: 122706 - DNA, 42 bp, Artificial Sequence
  primer
gtaaaacgacggccagtaatacccgtaatttctttatgggac

SEQ ID NO: 122707 - DNA, 21 bp, Artificial Sequence
  primer
agagtccagccctaaacctcc

SEQ ID NO: 122708 - DNA, 38 bp, Artificial Sequence
  primer
gtaaaacgacggccagtagggtacagaaaggacctggg

SEQ ID NO: 122709 - DNA, 36 bp, Artificial Sequence
  primer
gtaaaacgacggccagtcccacctgggtttatggtg

SEQ ID NO: 122710 - DNA, 24 bp, Artificial Sequence
  primer
tccatccattcattcttgtaacag

SEQ ID NO: 122711 - DNA, 21 bp, Artificial Sequence
  primer
tgagactggtcgtcttcatgc

SEQ ID NO: 122712 - DNA, 21 bp, Artificial Sequence
  primer
tcctctctcagacccaggagt

SEQ ID NO: 122713 - DNA, 19 bp, Artificial Sequence
  primer
ggcctctccataggaccag

SEQ ID NO: 122714 - DNA, 21 bp, Artificial Sequence
  primer
ggagactaccaccacgacgac

SEQ ID NO: 122715 - DNA, 37 bp, Artificial Sequence
  primer
gtaaaacgacggccagtacagaggcgattgtggtgag

SEQ ID NO: 122716 - DNA, 40 bp, Artificial Sequence
  primer
gtaaaacgacggccagtccaaatagttgctcaaacaaaga

SEQ ID NO: 122717 - DNA, 24 bp, Artificial Sequence
  primer
gacagccaaagaatcaatgcttac

SEQ ID NO: 122718 - DNA, 38 bp, Artificial Sequence
  primer
gtaaaacgacggccagtcatgcacgctcttactccttg

SEQ ID NO: 122719 - DNA, 22 bp, Artificial Sequence
  primer
ggtcatctctgctttcttccag

SEQ ID NO: 122720 - DNA, 42 bp, Artificial Sequence
  primer
gtaaaacgacggccagtgggtaatgcatactgtaaatggtca

SEQ ID NO: 122721 - DNA, 21 bp, Artificial Sequence
  primer
attgcaccacctactggacac

SEQ ID NO: 122722 - DNA, 38 bp, Artificial Sequence
  primer
gtaaaacgacggccagttccaccacatacggatagcag

SEQ ID NO: 122723 - DNA, 36 bp, Artificial Sequence
  primer
gtaaaacgacggccagtaaggatgcgaggactgggt

SEQ ID NO: 122724 - DNA, 39 bp, Artificial Sequence
  primer
gtaaaacgacggccagtttacaactctccaccatggacc

SEQ ID NO: 122725 - DNA, 21 bp, Artificial Sequence
  primer
actctgcttggagacagaggc

SEQ ID NO: 122726 - DNA, 37 bp, Artificial Sequence
  primer
gtaaaacgacggccagtaagaacagctccgtgaagcc

SEQ ID NO: 122727 - DNA, 20 bp, Artificial Sequence
  primer
accaccatctacatgcggtc

SEQ ID NO: 122728 - DNA, 21 bp, Artificial Sequence
  primer
ctctgggtaggaggctaggtg

SEQ ID NO: 122729 - DNA, 38 bp, Artificial Sequence
  primer
gtaaaacgacggccagtagtggtactttcctggcatcc

SEQ ID NO: 122730 - DNA, 19 bp, Artificial Sequence
  primer
ctcgtcctccagatccagc

SEQ ID NO: 122731 - DNA, 39 bp, Artificial Sequence
  primer
gtaaaacgacggccagtgtgtaacgtctgcctcacacac

SEQ ID NO: 122732 - DNA, 21 bp, Artificial Sequence
  primer
ataaaggcattgacgtcccac

SEQ ID NO: 122733 - DNA, 21 bp, Artificial Sequence
  primer
ccatgaaggagcctgagattc

SEQ ID NO: 122734 - DNA, 21 bp, Artificial Sequence
  primer
aagatgggaaggctgaaactg

SEQ ID NO: 122735 - DNA, 37 bp, Artificial Sequence
  primer
gtaaaacgacggccagtcagaggtgcagagtgccttc

SEQ ID NO: 122736 - DNA, 37 bp, Artificial Sequence
  primer
gtaaaacgacggccagtctggaacacgtcattcaggc

SEQ ID NO: 122737 - DNA, 38 bp, Artificial Sequence
  primer
gtaaaacgacggccagtcaactgacttagctcccaccc

SEQ ID NO: 122738 - DNA, 21 bp, Artificial Sequence
  primer
gaggaccagagcaagtaagca

SEQ ID NO: 122739 - DNA, 37 bp, Artificial Sequence
  primer
gtaaaacgacggccagtccttctcccaggtccagaac

SEQ ID NO: 122740 - DNA, 38 bp, Artificial Sequence
  primer
gtaaaacgacggccagttcaggttaacgacatccatgc

SEQ ID NO: 122741 - DNA, 38 bp, Artificial Sequence
  primer
gtaaaacgacggccagtgttgaagaacacccacgtgac

SEQ ID NO: 122742 - DNA, 19 bp, Artificial Sequence
  primer
acacaggtctaggtggccc

SEQ ID NO: 122743 - DNA, 22 bp, Artificial Sequence
  primer
cccttctctaatggctgaatcc

SEQ ID NO: 122744 - DNA, 20 bp, Artificial Sequence
  primer
tggtactgtggctcgaaagg

SEQ ID NO: 122745 - DNA, 21 bp, Artificial Sequence
  primer
atgcctcacgtggaaagattc

SEQ ID NO: 122746 - DNA, 21 bp, Artificial Sequence
  primer
aataaggccactgcttcttgg

SEQ ID NO: 122747 - DNA, 20 bp, Artificial Sequence
  primer
ctgccctccatctcctcttc

SEQ ID NO: 122748 - DNA, 40 bp, Artificial Sequence
  primer
gtaaaacgacggccagtcaaactgccgcattatgtaaatc

SEQ ID NO: 122749 - DNA, 40 bp, Artificial Sequence
  primer
gtaaaacgacggccagtgggctgaatattaagacagcaag

SEQ ID NO: 122750 - DNA, 41 bp, Artificial Sequence
  primer
gtaaaacgacggccagtcaatgtaagacaagacactggacg

SEQ ID NO: 122751 - DNA, 43 bp, Artificial Sequence
  primer
gtaaaacgacggccagttggtaaatggttctttagagttctgc

SEQ ID NO: 122752 - DNA, 43 bp, Artificial Sequence
  primer
gtaaaacgacggccagttcaccttaaatctactctaggccttc

SEQ ID NO: 122753 - DNA, 43 bp, Artificial Sequence
  primer
gtaaaacgacggccagtggagctacctagtctgataccaacac

SEQ ID NO: 122754 - DNA, 20 bp, Artificial Sequence
  primer
aaaggatgtggttgttggca

SEQ ID NO: 122755 - DNA, 23 bp, Artificial Sequence
  primer
ccctcttacgctacacaaagctc

SEQ ID NO: 122756 - DNA, 21 bp, Artificial Sequence
  primer
tatacaaccggaaggaacacg

SEQ ID NO: 122757 - DNA, 21 bp, Artificial Sequence
  primer
agcaatgcaatgatatgtggc

SEQ ID NO: 122758 - DNA, 37 bp, Artificial Sequence
  primer
gtaaaacgacggccagtgtgcacagtccatggcagac

SEQ ID NO: 122759 - DNA, 19 bp, Artificial Sequence
  primer
cagcccgtatttcagcacc

SEQ ID NO: 122760 - DNA, 21 bp, Artificial Sequence
  primer
gagtaacggatcccgagtgag

SEQ ID NO: 122761 - DNA, 20 bp, Artificial Sequence
  primer
agcaaacggtgagagctgag

SEQ ID NO: 122762 - DNA, 38 bp, Artificial Sequence
  primer
gtaaaacgacggccagtatctgggcctttatcgctttc

SEQ ID NO: 122763 - DNA, 21 bp, Artificial Sequence
  primer
gattgggtttgagaagggttg

SEQ ID NO: 122764 - DNA, 21 bp, Artificial Sequence
  primer
ggctccctagctgctgtagtc

SEQ ID NO: 122765 - DNA, 39 bp, Artificial Sequence
  primer
gtaaaacgacggccagttttgtgaacagagctcaagtgg

SEQ ID NO: 122766 - DNA, 22 bp, Artificial Sequence
  primer
tcctcctgtgcctatgctactc

SEQ ID NO: 122767 - DNA, 21 bp, Artificial Sequence
  primer
aacattgaggcaatccaaagg

SEQ ID NO: 122768 - DNA, 18 bp, Artificial Sequence
  primer
atttctgcgagaagcggg

SEQ ID NO: 122769 - DNA, 20 bp, Artificial Sequence
  primer
tgggagtagggaccgagaag

SEQ ID NO: 122770 - DNA, 21 bp, Artificial Sequence
  primer
agtagagtggcaagggacctg

SEQ ID NO: 122771 - DNA, 21 bp, Artificial Sequence
  primer
tcattccagttattgccttgg

SEQ ID NO: 122772 - DNA, 21 bp, Artificial Sequence
  primer
atggtttaggtgggacagtgg

SEQ ID NO: 122773 - DNA, 39 bp, Artificial Sequence
  primer
gtaaaacgacggccagtcccacagctcaagtctttatgg

SEQ ID NO: 122774 - DNA, 20 bp, Artificial Sequence
  primer
aaactcgggagacattctgg

SEQ ID NO: 122775 - DNA, 21 bp, Artificial Sequence
  primer
tagccttgtggaggaaattgg

SEQ ID NO: 122776 - DNA, 38 bp, Artificial Sequence
  primer
gtaaaacgacggccagtgaaacgtgatgtgactcctgc

SEQ ID NO: 122777 - DNA, 21 bp, Artificial Sequence
  primer
caagaatcatgatggaggcac

SEQ ID NO: 122778 - DNA, 38 bp, Artificial Sequence
  primer
gtaaaacgacggccagtaagttgctgagaactgccctg

SEQ ID NO: 122779 - DNA, 38 bp, Artificial Sequence
  primer
gtaaaacgacggccagttctgtgggtttcagatgaagg

SEQ ID NO: 122780 - DNA, 37 bp, Artificial Sequence
  primer
gtaaaacgacggccagtggccaacagaaagtgaaggc

SEQ ID NO: 122781 - DNA, 22 bp, Artificial Sequence
  primer
ccaagcctcttgaagttgactg

SEQ ID NO: 122782 - DNA, 21 bp, Artificial Sequence
  primer
atcatcaggaacttgtgctgg

SEQ ID NO: 122783 - DNA, 18 bp, Artificial Sequence
  primer
gtgtgagccactgtgccc

SEQ ID NO: 122784 - DNA, 38 bp, Artificial Sequence
  primer
gtaaaacgacggccagttgctgggtaagtaacactggg

SEQ ID NO: 122785 - DNA, 38 bp, Artificial Sequence
  primer
gtaaaacgacggccagttagtcttgcctcacaagctgc

SEQ ID NO: 122786 - DNA, 24 bp, Artificial Sequence
  primer
ccctgcatgtataagacactgaat

SEQ ID NO: 122787 - DNA, 22 bp, Artificial Sequence
  primer
aatcttagcctggaaactgagc

SEQ ID NO: 122788 - DNA, 21 bp, Artificial Sequence
  primer
ggaagagagtcatggctgagg

SEQ ID NO: 122789 - DNA, 21 bp, Artificial Sequence
  primer
ccaggccagaatatgaatgag

SEQ ID NO: 122790 - DNA, 38 bp, Artificial Sequence
  primer
gtaaaacgacggccagtgtagcgacgatcaccagtctc

SEQ ID NO: 122791 - DNA, 38 bp, Artificial Sequence
  primer
gtaaaacgacggccagtatccagagacagcttgggttc

SEQ ID NO: 122792 - DNA, 38 bp, Artificial Sequence
  primer
gtaaaacgacggccagtctaaagggtacagcagccacc

SEQ ID NO: 122793 - DNA, 39 bp, Artificial Sequence
  primer
gtaaaacgacggccagttgagaaacaaggaacaggaacc

SEQ ID NO: 122794 - DNA, 38 bp, Artificial Sequence
  primer
gtaaaacgacggccagttccttcaacttccttccatcg

SEQ ID NO: 122795 - DNA, 21 bp, Artificial Sequence
  primer
tgagcttcagggaaccaagag

SEQ ID NO: 122796 - DNA, 38 bp, Artificial Sequence
  primer
gtaaaacgacggccagttcatgtaagccaggtcttccc

SEQ ID NO: 122797 - DNA, 37 bp, Artificial Sequence
  primer
gtaaaacgacggccagtctaattgggaatggtgcgag

SEQ ID NO: 122798 - DNA, 38 bp, Artificial Sequence
  primer
gtaaaacgacggccagtacgattatcctccaatccagg

SEQ ID NO: 122799 - DNA, 38 bp, Artificial Sequence
  primer
gtaaaacgacggccagttgtagcaatgattggctttgg

SEQ ID NO: 122800 - DNA, 38 bp, Artificial Sequence
  primer
gtaaaacgacggccagttctgcaagagaagtgtccctg

SEQ ID NO: 122801 - DNA, 38 bp, Artificial Sequence
  primer
gtaaaacgacggccagttaggtggtgaggaaaggatgc

SEQ ID NO: 122802 - DNA, 38 bp, Artificial Sequence
  primer
gtaaaacgacggccagtaagcaacagagcaagaccctg

SEQ ID NO: 122803 - DNA, 21 bp, Artificial Sequence
  primer
tgctggaaatgagcatgattc

SEQ ID NO: 122804 - DNA, 19 bp, Artificial Sequence
  primer
gcttcgccttgaggatgtc

SEQ ID NO: 122805 - DNA, 20 bp, Artificial Sequence
  primer
agacctcccatcaccaggtc

SEQ ID NO: 122806 - DNA, 20 bp, Artificial Sequence
  primer
ccatcagctgaggattgtcc

SEQ ID NO: 122807 - DNA, 21 bp, Artificial Sequence
  primer
gcttgtcctggaccatctttc

SEQ ID NO: 122808 - DNA, 37 bp, Artificial Sequence
  primer
gtaaaacgacggccagtctctgctgggaggaggagtc

SEQ ID NO: 122809 - DNA, 38 bp, Artificial Sequence
  primer
gtaaaacgacggccagtaacctgtttgtccgagagcag

SEQ ID NO: 122810 - DNA, 21 bp, Artificial Sequence
  primer
tttccgagcttaaccttgtgc

SEQ ID NO: 122811 - DNA, 38 bp, Artificial Sequence
  primer
gtaaaacgacggccagtcagccttaacaaagattgccc

SEQ ID NO: 122812 - DNA, 40 bp, Artificial Sequence
  primer
gtaaaacgacggccagttctgttcagcaactatttagccc

SEQ ID NO: 122813 - DNA, 22 bp, Artificial Sequence
  primer
cctcattagagatgggctggac

SEQ ID NO: 122814 - DNA, 20 bp, Artificial Sequence
  primer
agttcccaaccaggctcaag

SEQ ID NO: 122815 - DNA, 22 bp, Artificial Sequence
  primer
gaggcttgtctacatgacaccc

SEQ ID NO: 122816 - DNA, 21 bp, Artificial Sequence
  primer
aaccctcaaacaggaccaaac

SEQ ID NO: 122817 - DNA, 21 bp, Artificial Sequence
  primer
ctgacaatgatgtgactcccg

SEQ ID NO: 122818 - DNA, 21 bp, Artificial Sequence
  primer
tcactgcacacagagtccttg

SEQ ID NO: 122819 - DNA, 27 bp, Artificial Sequence
  primer
tgaccgtctttgagtagtagatatgac

SEQ ID NO: 122820 - DNA, 21 bp, Artificial Sequence
  primer
tctagggcagaatgcgatagg

SEQ ID NO: 122821 - DNA, 20 bp, Artificial Sequence
  primer
atggatggaagggtcaatgg

SEQ ID NO: 122822 - DNA, 36 bp, Artificial Sequence
  primer
gtaaaacgacggccagtagccctctcactgcacagc

SEQ ID NO: 122823 - DNA, 38 bp, Artificial Sequence
  primer
gtaaaacgacggccagttcatgcctgatgaatacctcc

SEQ ID NO: 122824 - DNA, 38 bp, Artificial Sequence
  primer
gtaaaacgacggccagtccaggaggatgtgaggttctc

SEQ ID NO: 122825 - DNA, 38 bp, Artificial Sequence
  primer
gtaaaacgacggccagtaggcactagtgggtgttcagg

SEQ ID NO: 122826 - DNA, 38 bp, Artificial Sequence
  primer
gtaaaacgacggccagtacattcaaaggaagctgaggg

SEQ ID NO: 122827 - DNA, 38 bp, Artificial Sequence
  primer
gtaaaacgacggccagtgcaccaagggtgataggattc

SEQ ID NO: 122828 - DNA, 20 bp, Artificial Sequence
  primer
cacaagctccatgaacggtg

SEQ ID NO: 122829 - DNA, 21 bp, Artificial Sequence
  primer
tatccttgtcctgagtgaccg

SEQ ID NO: 122830 - DNA, 21 bp, Artificial Sequence
  primer
catgacctgctcactcatttg

SEQ ID NO: 122831 - DNA, 38 bp, Artificial Sequence
  primer
gtaaaacgacggccagtcaggctggcttcagctatttc

SEQ ID NO: 122832 - DNA, 21 bp, Artificial Sequence
  primer
aatgctagagagcaagtgggc

SEQ ID NO: 122833 - DNA, 21 bp, Artificial Sequence
  primer
gcttactgcccacaaattacg

SEQ ID NO: 122834 - DNA, 21 bp, Artificial Sequence
  primer
agagacgtgtttccaagacgg

SEQ ID NO: 122835 - DNA, 21 bp, Artificial Sequence
  primer
tccactgtgcactaacgcttc

SEQ ID NO: 122836 - DNA, 21 bp, Artificial Sequence
  primer
gctgagtcaaacctcctctcc

SEQ ID NO: 122837 - DNA, 41 bp, Artificial Sequence
  primer
gtaaaacgacggccagtggtaagcccatgatttatcagttc

SEQ ID NO: 122838 - DNA, 21 bp, Artificial Sequence
  primer
gacccagaacacattcacctg

SEQ ID NO: 122839 - DNA, 21 bp, Artificial Sequence
  primer
ggcatcactgaaggaaggaag

SEQ ID NO: 122840 - DNA, 21 bp, Artificial Sequence
  primer
cagtctcaacgcataactggg

SEQ ID NO: 122841 - DNA, 37 bp, Artificial Sequence
  primer
gtaaaacgacggccagtgctgagacccacagaactgg

SEQ ID NO: 122842 - DNA, 21 bp, Artificial Sequence
  primer
tttggccttatgtcactgtcg

SEQ ID NO: 122843 - DNA, 21 bp, Artificial Sequence
  primer
ggaggcaaatggacagatgag

SEQ ID NO: 122844 - DNA, 40 bp, Artificial Sequence
  primer
gtaaaacgacggccagtgcaggactgaactctgagagagg

SEQ ID NO: 122845 - DNA, 37 bp, Artificial Sequence
  primer
gtaaaacgacggccagtaaggccctcactcgatcttg

SEQ ID NO: 122846 - DNA, 21 bp, Artificial Sequence
  primer
tgatcctagttcaccaatggc

SEQ ID NO: 122847 - DNA, 38 bp, Artificial Sequence
  primer
gtaaaacgacggccagtacatgaagatcaggtgctccc

SEQ ID NO: 122848 - DNA, 37 bp, Artificial Sequence
  primer
gtaaaacgacggccagtaaccacagggcaggaatctc

SEQ ID NO: 122849 - DNA, 21 bp, Artificial Sequence
  primer
tggaatagctggacaccaatg

SEQ ID NO: 122850 - DNA, 21 bp, Artificial Sequence
  primer
agaagtggagggagagggttc

SEQ ID NO: 122851 - DNA, 38 bp, Artificial Sequence
  primer
gtaaaacgacggccagtgggttgcagcctgtttcatag

SEQ ID NO: 122852 - DNA, 21 bp, Artificial Sequence
  primer
gacaccttaggcaagagggtg

SEQ ID NO: 122853 - DNA, 38 bp, Artificial Sequence
  primer
gtaaaacgacggccagtcatcctggaggtgaggaaatg

SEQ ID NO: 122854 - DNA, 18 bp, Artificial Sequence
  primer
gcctcccatgaccttgag

SEQ ID NO: 122855 - DNA, 38 bp, Artificial Sequence
  primer
gtaaaacgacggccagtcaacctcctttccttgtcacc

SEQ ID NO: 122856 - DNA, 39 bp, Artificial Sequence
  primer
gtaaaacgacggccagtttataaacacacaaacaccggc

SEQ ID NO: 122857 - DNA, 22 bp, Artificial Sequence
  primer
aatagtggccagatgtcaaacc

SEQ ID NO: 122858 - DNA, 21 bp, Artificial Sequence
  primer
acgagtgcatttgtccagctc

SEQ ID NO: 122859 - DNA, 21 bp, Artificial Sequence
  primer
cattaagcctcacttcctccc

SEQ ID NO: 122860 - DNA, 20 bp, Artificial Sequence
  primer
ctctaaaggccatgtgcagc

SEQ ID NO: 122861 - DNA, 38 bp, Artificial Sequence
  primer
gtaaaacgacggccagtaaaggaggcctgtggtacaag

SEQ ID NO: 122862 - DNA, 39 bp, Artificial Sequence
  primer
gtaaaacgacggccagttgccacttggtgtactgacatc

SEQ ID NO: 122863 - DNA, 22 bp, Artificial Sequence
  primer
tggaagggtaaggtaaagctcc

SEQ ID NO: 122864 - DNA, 21 bp, Artificial Sequence
  primer
gctttgtcccactggctctac

SEQ ID NO: 122865 - DNA, 21 bp, Artificial Sequence
  primer
ttcgtcatcttccatacacgc

SEQ ID NO: 122866 - DNA, 38 bp, Artificial Sequence
  primer
gtaaaacgacggccagtctgtaggcctattccaaaccc

SEQ ID NO: 122867 - DNA, 21 bp, Artificial Sequence
  primer
tcttccacaccagcgtcatag

SEQ ID NO: 122868 - DNA, 39 bp, Artificial Sequence
  primer
gtaaaacgacggccagtccatatcacgtaatggaaaggg

SEQ ID NO: 122869 - DNA, 42 bp, Artificial Sequence
  primer
gtaaaacgacggccagtttgaagtgctggagatctattatgg

SEQ ID NO: 122870 - DNA, 23 bp, Artificial Sequence
  primer
aaactgagaggtaggaagccttg

SEQ ID NO: 122871 - DNA, 21 bp, Artificial Sequence
  primer
tctcaacagaaacttcctggg

SEQ ID NO: 122872 - DNA, 22 bp, Artificial Sequence
  primer
aatgtctccattccttcactgc

SEQ ID NO: 122873 - DNA, 41 bp, Artificial Sequence
  primer
gtaaaacgacggccagtaactcacaaattgcttatcacagg

SEQ ID NO: 122874 - DNA, 27 bp, Artificial Sequence
  primer
tttggatttggtcataaatacagtaaa

SEQ ID NO: 122875 - DNA, 39 bp, Artificial Sequence
  primer
gtaaaacgacggccagtcctgcaggtttataaggcattc

SEQ ID NO: 122876 - DNA, 21 bp, Artificial Sequence
  primer
tgcctggttaagaaccctacg

SEQ ID NO: 122877 - DNA, 21 bp, Artificial Sequence
  primer
gttgaaggactgttgctgacg

SEQ ID NO: 122878 - DNA, 22 bp, Artificial Sequence
  primer
tctttcccttgtagctgtgagc

SEQ ID NO: 122879 - DNA, 40 bp, Artificial Sequence
  primer
gtaaaacgacggccagttcacctgcttgattctaaattgc

SEQ ID NO: 122880 - DNA, 21 bp, Artificial Sequence
  primer
gttgaaggactgttgctgacg

SEQ ID NO: 122881 - DNA, 22 bp, Artificial Sequence
  primer
tctttcccttgtagctgtgagc

SEQ ID NO: 122882 - DNA, 40 bp, Artificial Sequence; identical to SEQ ID NO: 122879
  primer

SEQ ID NO: 122883 - DNA, 21 bp, Artificial Sequence
  primer
agacagctggtgttggttgtc

SEQ ID NO: 122884 - DNA, 20 bp, Artificial Sequence
  primer
tgactttggtggttgtgtgg

SEQ ID NO: 122885 - DNA, 38 bp, Artificial Sequence
  primer
gtaaaacgacggccagtgcaaatggagatctacctgcc

SEQ ID NO: 122886 - DNA, 38 bp, Artificial Sequence
  primer
gtaaaacgacggccagtttcctgtccttccaaatccag

SEQ ID NO: 122887 - DNA, 38 bp, Artificial Sequence
  primer
gtaaaacgacggccagtaggtggcagggattcattaag

SEQ ID NO: 122888 - DNA, 40 bp, Artificial Sequence
  primer
gtaaaacgacggccagtgagcagatttcagatagttcctg

SEQ ID NO: 122889 - DNA, 38 bp, Artificial Sequence
  primer
gtaaaacgacggccagtacagctaggagagaattgcgg

SEQ ID NO: 122890 - DNA, 23 bp, Artificial Sequence
  primer
aaagctatttgagccagaagaaa

SEQ ID NO: 122891 - DNA, 24 bp, Artificial Sequence
  primer
gatcaggacctctgtaacaactga

SEQ ID NO: 122892 - DNA, 20 bp, Artificial Sequence
  primer
gtgggaggtcatgcttcatc

SEQ ID NO: 122893 - DNA, 40 bp, Artificial Sequence
  primer
gtaaaacgacggccagtgcttagttggcactcagaacaag

SEQ ID NO: 122894 - DNA, 21 bp, Artificial Sequence
  primer
acacatggctttccttcattg

SEQ ID NO: 122895 - DNA, 21 bp, Artificial Sequence
  primer
ctgaagcggtaggaggatcac

SEQ ID NO: 122896 - DNA, 38 bp, Artificial Sequence
  primer
gtaaaacgacggccagttacatgctagtcccatgcacc

SEQ ID NO: 122897 - DNA, 38 bp, Artificial Sequence
  primer
gtaaaacgacggccagtgccacttcagtcgcattattc

SEQ ID NO: 122898 - DNA, 42 bp, Artificial Sequence
  primer
gtaaaacgacggccagtggtaagcaagctaagcagtcaatac

SEQ ID NO: 122899 - DNA, 21 bp, Artificial Sequence
  primer
aggcaacaaggaataactggc

SEQ ID NO: 122900 - DNA, 27 bp, Artificial Sequence
  primer
aggtcatcaggtacttcaaactcttac

SEQ ID NO: 122901 - DNA, 44 bp, Artificial Sequence
  primer
gtaaaacgacggccagtgcggtctatacagcttcatatctttac

SEQ ID NO: 122902 - DNA, 21 bp, Artificial Sequence
  primer
tgagctgacctggtctgaaag

SEQ ID NO: 122903 - DNA, 22 bp, Artificial Sequence
  primer
gcaaagaggttcagttagggag

SEQ ID NO: 122904 - DNA, 27 bp, Artificial Sequence
  primer
gcatgaaagtgtcagtcttataaccag

SEQ ID NO: 122905 - DNA, 23 bp, Artificial Sequence
  primer
cagtggtaaagatttggcaaaga

SEQ ID NO: 122906 - DNA, 20 bp, Artificial Sequence
  primer
gtcacattgcacacactggg

SEQ ID NO: 122907 - DNA, 20 bp, Artificial Sequence
  primer
aagtgcctgcacatctccac

SEQ ID NO: 122908 - DNA, 18 bp, Artificial Sequence
  primer
agcacagccggtgaactg

SEQ ID NO: 122909 - DNA, 21 bp, Artificial Sequence
  primer
agacaggacccaaccagacag

SEQ ID NO: 122910 - DNA, 38 bp, Artificial Sequence
  primer
gtaaaacgacggccagtgggtatggtctagggtgccag

SEQ ID NO: 122911 - DNA, 37 bp, Artificial Sequence
  primer
gtaaaacgacggccagtactcggaacacgatctccag

SEQ ID NO: 122912 - DNA, 37 bp, Artificial Sequence
  primer
gtaaaacgacggccagtacttgtgagggcatcctgtg

SEQ ID NO: 122913 - DNA, 38 bp, Artificial Sequence
  primer
gtaaaacgacggccagttcctccatctccttgctcttc

SEQ ID NO: 122914 - DNA, 37 bp, Artificial Sequence
  primer
gtaaaacgacggccagtgcctaacaggtgaaggacgg

SEQ ID NO: 122915 - DNA, 38 bp, Artificial Sequence
  primer
gtaaaacgacggccagttagggctgcttagtcctccag

SEQ ID NO: 122916 - DNA, 38 bp, Artificial Sequence
  primer
gtaaaacgacggccagttctcagaatgtggagctgctg

SEQ ID NO: 122917 - DNA, 21 bp, Artificial Sequence
  primer
cactcccaaagcttatccagg

SEQ ID NO: 122918 - DNA, 21 bp, Artificial Sequence
  primer
gtccacctgcgtctcaagttc

SEQ ID NO: 122919 - DNA, 21 bp, Artificial Sequence
  primer
atgtggtcctgggatagggag

SEQ ID NO: 122920 - DNA, 35 bp, Artificial Sequence
  primer
gtaaaacgacggccagtcagatcgggaggcaggac

SEQ ID NO: 122921 - DNA, 38 bp, Artificial Sequence
  primer
gtaaaacgacggccagtctcctcgatctggtccttgag

SEQ ID NO: 122922 - DNA, 36 bp, Artificial Sequence
  primer
gtaaaacgacggccagtccaagtagctcctcgtccg

SEQ ID NO: 122923 - DNA, 21 bp, Artificial Sequence
  primer
gtagtttgtcaagtgcggcag

SEQ ID NO: 122924 - DNA, 22 bp, Artificial Sequence
  primer
tcacaggcatcaagagacacag

SEQ ID NO: 122925 - DNA, 20 bp, Artificial Sequence
  primer
gagcccaggtcctctgattc

SEQ ID NO: 122926 - DNA, 38 bp, Artificial Sequence
  primer
gtaaaacgacggccagtacagtgctaggatacccggag

SEQ ID NO: 122927 - DNA, 38 bp, Artificial Sequence
  primer
gtaaaacgacggccagtccctctttcttcctggtctgg

SEQ ID NO: 122928 - DNA, 21 bp, Artificial Sequence
  primer
caccatctgaagtggtggttg

SEQ ID NO: 122929 - DNA, 36 bp, Artificial Sequence
  primer
gtaaaacgacggccagtatgcgggaaggaacacaag

SEQ ID NO: 122930 - DNA, 21 bp, Artificial Sequence
  primer
acccagggaacaaagattctg

SEQ ID NO: 122931 - DNA, 21 bp, Artificial Sequence
  primer
gtggagcagtgtctggtaggg

SEQ ID NO: 122932 - DNA, 21 bp, Artificial Sequence
  primer
acccataagaaatgggcttcc

SEQ ID NO: 122933 - DNA, 21 bp, Artificial Sequence
  primer
tacggcaatggaatgaaacag

SEQ ID NO: 122934 - DNA, 21 bp, Artificial Sequence
  primer
gaaagaacagaccaccttcgc

SEQ ID NO: 122935 - DNA, 38 bp, Artificial Sequence
  primer
gtaaaacgacggccagtccagaaaggttgagggacatc

SEQ ID NO: 122936 - DNA, 21 bp, Artificial Sequence
  primer
gggatgtggaaggtcagattc

SEQ ID NO: 122937 - DNA, 21 bp, Artificial Sequence
  primer
ccaggagttgcacttggtttc

SEQ ID NO: 122938 - DNA, 20 bp, Artificial Sequence
  primer
ctcaggacaccaaatgccag

SEQ ID NO: 122939 - DNA, 21 bp, Artificial Sequence
  primer
aagaaggaagctgagccctct

SEQ ID NO: 122940 - DNA, 21 bp, Artificial Sequence
  primer
tgcttgatgctgtcaagaagg

SEQ ID NO: 122941 - DNA, 21 bp, Artificial Sequence
  primer
accctgactattcaagcctgc

SEQ ID NO: 122942 - DNA, 21 bp, Artificial Sequence
  primer
taagatctgggccagccatac

SEQ ID NO: 122943 - DNA, 18 bp, Artificial Sequence
  primer
gctcaggaacactggccc

SEQ ID NO: 122944 - DNA, 36 bp, Artificial Sequence
  primer
gtaaaacgacggccagtctggttcacgctctgctcc

SEQ ID NO: 122945 - DNA, 21 bp, Artificial Sequence
  primer
tggcagatacacaggttcagg

SEQ ID NO: 122946 - DNA, 21 bp, Artificial Sequence
  primer
cctgccagctctgtctagttg

SEQ ID NO: 122947 - DNA, 21 bp, Artificial Sequence
  primer
gcctcctgctagagtaaaccc

SEQ ID NO: 122948 - DNA, 21 bp, Artificial Sequence
  primer
agtcaagggaaggagtagggc

SEQ ID NO: 122949 - DNA, 20 bp, Artificial Sequence
  primer
cccagtagacgcagcttcag

SEQ ID NO: 122950 - DNA, 38 bp, Artificial Sequence
  primer
gtaaaacgacggccagtccagagtgatggtccctaacc

SEQ ID NO: 122951 - DNA, 19 bp, Artificial Sequence
  primer
gcctcacctccctcaagtg

SEQ ID NO: 122952 - DNA, 20 bp, Artificial Sequence
  primer
agaggaggcaaggctcagac

SEQ ID NO: 122953 - DNA, 18 bp, Artificial Sequence
  primer
gttccagcagctccctcc

SEQ ID NO: 122954 - DNA, 38 bp, Artificial Sequence
  primer
gtaaaacgacggccagtacgtgaagtcactagcccagg

SEQ ID NO: 122955 - DNA, 21 bp, Artificial Sequence
  primer
ttagagcgcttctgagctttg

SEQ ID NO: 122956 - DNA, 21 bp, Artificial Sequence
  primer
aagagcagcggtaggtgtctg

SEQ ID NO: 122957 - DNA, 21 bp, Artificial Sequence
  primer
taggcctttgcaaggttcttc

SEQ ID NO: 122958 - DNA, 21 bp, Artificial Sequence
  primer
ggagactaccagggtgacagc

SEQ ID NO: 122959 - DNA, 19 bp, Artificial Sequence
  primer
ctgcagcagttggctcctc

SEQ ID NO: 122960 - DNA, 21 bp, Artificial Sequence
  primer
cttctccttcacgtccacctc

SEQ ID NO: 122961 - DNA, 38 bp, Artificial Sequence
  primer
gtaaaacgacggccagtttctccaccacgctgtacttg

SEQ ID NO: 122962 - DNA, 38 bp, Artificial Sequence
  primer
gtaaaacgacggccagtcgagtgatctcctgctctgtc

SEQ ID NO: 122963 - DNA, 18 bp, Artificial Sequence
  primer
tcaggcggtcgatctcac

SEQ ID NO: 122964 - DNA, 38 bp, Artificial Sequence
  primer
gtaaaacgacggccagtcttgctctgcagctcgtacac

SEQ ID NO: 122965 - DNA, 36 bp, Artificial Sequence
  primer
gtaaaacgacggccagtgctgctgcacctcaagctc

SEQ ID NO: 122966 - DNA, 38 bp, Artificial Sequence
  primer
gtaaaacgacggccagttttctggaggacgtcaatctg

SEQ ID NO: 122967 - DNA, 21 bp, Artificial Sequence
  primer
acccggatcacttccttgtag

SEQ ID NO: 122968 - DNA, 38 bp, Artificial Sequence
  primer
gtaaaacgacggccagtcgctccttctcgtagatctgg

SEQ ID NO: 122969 - DNA, 38 bp, Artificial Sequence
  primer
gtaaaacgacggccagtagatcttggtggaaaggttgg

SEQ ID NO: 122970 - DNA, 21 bp, Artificial Sequence
  primer
gtccaggagcacagactcctc

SEQ ID NO: 122971 - DNA, 38 bp, Artificial Sequence
  primer
gtaaaacgacggccagttgatgctgcacttgttgtctg

SEQ ID NO: 122972 - DNA, 21 bp, Artificial Sequence
  primer
ctctgtgtggaggtgttctcg

SEQ ID NO: 122973 - DNA, 21 bp, Artificial Sequence
  primer
ctccttgtagctcagccgttc

SEQ ID NO: 122974 - DNA, 38 bp, Artificial Sequence
  primer
gtaaaacgacggccagtctctgaggcaagaggtgtacg

SEQ ID NO: 122975 - DNA, 20 bp, Artificial Sequence
  primer
ctgcctgcgagtccatctac

SEQ ID NO: 122976 - DNA, 38 bp, Artificial Sequence
  primer
gtaaaacgacggccagtgaagggagtgtcttcctcctg

SEQ ID NO: 122977 - DNA, 37 bp, Artificial Sequence
  primer
gtaaaacgacggccagttttcagggagttggcagttg

SEQ ID NO: 122978 - DNA, 38 bp, Artificial Sequence
  primer
gtaaaacgacggccagtaaggtgaggaaggagtccgag

SEQ ID NO: 122979 - DNA, 18 bp, Artificial Sequence
  primer
tttccgccctctcctttc

SEQ ID NO: 122980 - DNA, 36 bp, Artificial Sequence
  primer
gtaaaacgacggccagtggaagattccagaaccggc

SEQ ID NO: 122981 - DNA, 21 bp, Artificial Sequence
  primer
gattacctgggtggtctgtgc

SEQ ID NO: 122982 - DNA, 37 bp, Artificial Sequence
  primer
gtaaaacgacggccagtcacaatggagtccttcgcac

SEQ ID NO: 122983 - DNA, 41 bp, Artificial Sequence
  primer
gtaaaacgacggccagtcatccgaaagcatgactaataagc

SEQ ID NO: 122984 - DNA, 44 bp, Artificial Sequence
  primer
gtaaaacgacggccagtcatctgagagtatatgaaagcaaccac

SEQ ID NO: 122985 - DNA, 38 bp, Artificial Sequence
  primer
gtaaaacgacggccagtttagctgccaggcaacactat

SEQ ID NO: 122986 - DNA, 37 bp, Artificial Sequence
  primer
gtaaaacgacggccagtctgtactccagcctcagccc

SEQ ID NO: 122987 - DNA, 39 bp, Artificial Sequence
  primer
gtaaaacgacggccagttttcagtcccttctttccactg

SEQ ID NO: 122988 - DNA, 20 bp, Artificial Sequence
  primer
gccggcagtacccattagtc

SEQ ID NO: 122989 - DNA, 38 bp, Artificial Sequence
  primer
gtaaaacgacggccagtggatttcccaaactgtccttg

SEQ ID NO: 122990 - DNA, 21 bp, Artificial Sequence
  primer
aagaagtcaggcaaaggcaac

SEQ ID NO: 122991 - DNA, 38 bp, Artificial Sequence
  primer
gtaaaacgacggccagtgatggaaggtcttcttgctcc

SEQ ID NO: 122992 - DNA, 21 bp, Artificial Sequence
  primer
gcctcccatgttcttctcttc

SEQ ID NO: 122993 - DNA, 22 bp, Artificial Sequence
  primer
tgactagtgtccctaaccagcc

SEQ ID NO: 122994 - DNA, 38 bp, Artificial Sequence
  primer
gtaaaacgacggccagtactgcagtttaccaagcccac

SEQ ID NO: 122995 - DNA, 21 bp, Artificial Sequence
  primer
gctcctcccaaccactatcac

SEQ ID NO: 122996 - DNA, 21 bp, Artificial Sequence
  primer
aaactccgcacactaccattt

SEQ ID NO: 122997 - DNA, 23 bp, Artificial Sequence
  primer
tcctgataagttctggcattgag

SEQ ID NO: 122998 - DNA, 38 bp, Artificial Sequence
  primer
gtaaaacgacggccagtctaggacaacaggtgcaagcc

SEQ ID NO: 122999 - DNA, 38 bp, Artificial Sequence
  primer
gtaaaacgacggccagtgccctttacttgaggttaggc

SEQ ID NO: 123000 - DNA, 23 bp, Artificial Sequence
  primer
tccacattacacaaacatcaagc

SEQ ID NO: 123001 - DNA, 21 bp, Artificial Sequence
  primer
agtgcctcagtcatttgctcc

SEQ ID NO: 123002 - DNA, 21 bp, Artificial Sequence
  primer
atgcatagtggatgagcctcg

SEQ ID NO: 123003 - DNA, 21 bp, Artificial Sequence
  primer
tacattctgcacagagcctgg

SEQ ID NO: 123004 - DNA, 18 bp, Artificial Sequence
  primer
cttcgcgactttgcgttg

SEQ ID NO: 123005 - DNA, 20 bp, Artificial Sequence
  primer
cacgttctgcacatgtaccc

SEQ ID NO: 123006 - DNA, 39 bp, Artificial Sequence
  primer
gtaaaacgacggccagttgagaaagctttgatgcatttg

SEQ ID NO: 123007 - DNA, 21 bp, Artificial Sequence
  primer
cagattatcactctgcctcgg

SEQ ID NO: 123008 - DNA, 25 bp, Artificial Sequence
  primer
caacttaaacacctacagtcaagca

SEQ ID NO: 123009 - DNA, 39 bp, Artificial Sequence
  primer
gtaaaacgacggccagtcgaaactaggaagagttgggag

SEQ ID NO: 123010 - DNA, 38 bp, Artificial Sequence
  primer
gtaaaacgacggccagtaagtgcctcattcccaaacag

SEQ ID NO: 123011 - DNA, 37 bp, Artificial Sequence
  primer
gtaaaacgacggccagtaaatctcagccctgggaaac

SEQ ID NO: 123012 - DNA, 42 bp, Artificial Sequence
  primer
gtaaaacgacggccagttttacacgaatctaccagctttaca

SEQ ID NO: 123013 - DNA, 21 bp, Artificial Sequence
  primer
ctgggatgtttctggagtttg

SEQ ID NO: 123014 - DNA, 38 bp, Artificial Sequence
  primer
gtaaaacgacggccagttcaaagagctcgcagacctaa

SEQ ID NO: 123015 - DNA, 38 bp, Artificial Sequence
  primer
gtaaaacgacggccagttcacaccctgtaaacaccctg

SEQ ID NO: 123016 - DNA, 38 bp, Artificial Sequence
  primer
gtaaaacgacggccagtcgcgatatcaggtccaagaac

SEQ ID NO: 123017 - DNA, 22 bp, Artificial Sequence
  primer
ttgcagaacacattccacattc

SEQ ID NO: 123018 - DNA, 39 bp, Artificial Sequence
  primer
gtaaaacgacggccagtttctttgcagaacacattccac

SEQ ID NO: 123019 - DNA, 21 bp, Artificial Sequence
  primer
atgtcctacgccagataaccc

SEQ ID NO: 123020 - DNA, 25 bp, Artificial Sequence
  primer
ccaagtaaattaggtagtcagtgcc

SEQ ID NO: 123021 - DNA, 40 bp, Artificial Sequence
  primer
gtaaaacgacggccagtaaagcgatgatggctgataatac

SEQ ID NO: 123022 - DNA, 21 bp, Artificial Sequence
  primer
gacgatggctagagatgttgg

SEQ ID NO: 123023 - DNA, 38 bp, Artificial Sequence
  primer
gtaaaacgacggccagttgggcagtaatggatgtcttg

SEQ ID NO: 123024 - DNA, 21 bp, Artificial Sequence
  primer
tgaacaggaaacagtggaggc

SEQ ID NO: 123025 - DNA, 22 bp, Artificial Sequence
  primer
ggatttggacactgaaaggagg

SEQ ID NO: 123026 - DNA, 36 bp, Artificial Sequence
  primer
gtaaaacgacggccagtgagctgcaacacatggagc

SEQ ID NO: 123027 - DNA, 38 bp, Artificial Sequence
  primer
gtaaaacgacggccagtcacactttaacttgcatcggc

SEQ ID NO: 123028 - DNA, 26 bp, Artificial Sequence
  primer
aacataaatgaaacatttgggtattg

SEQ ID NO: 123029 - DNA, 29 bp, Artificial Sequence
  primer
aagataaactatggaaagaatataggtcg

SEQ ID NO: 123030 - DNA, 38 bp, Artificial Sequence
  primer
gtaaaacgacggccagtcaaggatgcaggaacacagtc

SEQ ID NO: 123031 - DNA, 38 bp, Artificial Sequence
  primer
gtaaaacgacggccagtcacaggctaggaaacagcttg

SEQ ID NO: 123032 - DNA, 38 bp, Artificial Sequence
  primer
gtaaaacgacggccagttccaagaaatgggtttaagca

SEQ ID NO: 123033 - DNA, 21 bp, Artificial Sequence
  primer
acccaagacacattctgaggg

SEQ ID NO: 123034 - DNA, 26 bp, Artificial Sequence
  primer
tgaacttcttcaatcagtagatccat

SEQ ID NO: 123035 - DNA, 22 bp, Artificial Sequence
  primer
tgtgttacaaagtggccttgac

SEQ ID NO: 123036 - DNA, 22 bp, Artificial Sequence
  primer
catgcaagttacaggtgacgag

SEQ ID NO: 123037 - DNA, 21 bp, Artificial Sequence
  primer
agcactcaaccttctgctgag

SEQ ID NO: 123038 - DNA, 22 bp, Artificial Sequence
  primer
ccttgcacattaccataaaggc

SEQ ID NO: 123039 - DNA, 38 bp, Artificial Sequence
  primer
gtaaaacgacggccagtcaaagcacactgcacacagag

SEQ ID NO: 123040 - DNA, 38 bp, Artificial Sequence
  primer
gtaaaacgacggccagttttctccttccaattcttggg

SEQ ID NO: 123041 - DNA, 21 bp, Artificial Sequence
  primer
ctctcacacacggcttctacc

SEQ ID NO: 123042 - DNA, 37 bp, Artificial Sequence
  primer
gtaaaacgacggccagtcagagcaacaccctgaggtc

SEQ ID NO: 123043 - DNA, 21 bp, Artificial Sequence
  primer
agtcaacgctaaggcatttcc

SEQ ID NO: 123044 - DNA, 38 bp, Artificial Sequence
  primer
gtaaaacgacggccagtgaggacttagatgcaccaggc

SEQ ID NO: 123045 - DNA, 22 bp, Artificial Sequence
  primer
tgaagaacacaggagtgacacg

SEQ ID NO: 123046 - DNA, 21 bp, Artificial Sequence
  primer
agggttcaggttcaacacagc

SEQ ID NO: 123047 - DNA, 37 bp, Artificial Sequence
  primer
gtaaaacgacggccagtatccgcacggtacagttcac

SEQ ID NO: 123048 - DNA, 20 bp, Artificial Sequence
  primer
ctcccttgggctgataggac

SEQ ID NO: 123049 - DNA, 38 bp, Artificial Sequence
  primer
gtaaaacgacggccagtcgacacactcccatctactgg

SEQ ID NO: 123050 - DNA, 20 bp, Artificial Sequence
  primer
cagacagaaggagggacctg

SEQ ID NO: 123051 - DNA, 21 bp, Artificial Sequence
  primer
gcatcacactggcacctaaag

SEQ ID NO: 123052 - DNA, 37 bp, Artificial Sequence
  primer
gtaaaacgacggccagtctgtttcgcacctctctccc

SEQ ID NO: 123053 - DNA, 39 bp, Artificial Sequence
  primer
gtaaaacgacggccagtgctgaaagcaatctcaacagtc

SEQ ID NO: 123054 - DNA, 19 bp, Artificial Sequence
  primer
ggaaagccaatgccaagag

SEQ ID NO: 123055 - DNA, 41 bp, Artificial Sequence
  primer
gtaaaacgacggccagtttgaagtctaactctggaaagcaa

SEQ ID NO: 123056 - DNA, 40 bp, Artificial Sequence
  primer
gtaaaacgacggccagtcagcaagtgctcaataaatttcc

SEQ ID NO: 123057 - DNA, 24 bp, Artificial Sequence
  primer
tttgagggaagagaaatcaaactc

SEQ ID NO: 123058 - DNA, 29 bp, Artificial Sequence
  primer
ttcaataccatttacagagtatcaaatgt

SEQ ID NO: 123059 - DNA, 40 bp, Artificial Sequence
  primer
gtaaaacgacggccagttgacagagtattccagcgtcttc

SEQ ID NO: 123060 - DNA, 22 bp, Artificial Sequence
  primer
aagcatgaggattcctttctcc

SEQ ID NO: 123061 - DNA, 22 bp, Artificial Sequence
  primer
gcataacatccaattcctgacg

SEQ ID NO: 123062 - DNA, 25 bp, Artificial Sequence
  primer
tcatttcaacatgtggtttaagaac

SEQ ID NO: 123063 - DNA, 38 bp, Artificial Sequence
  primer
gtaaaacgacggccagtttggtatcctcggaggttctg

SEQ ID NO: 123064 - DNA, 38 bp, Artificial Sequence
  primer
gtaaaacgacggccagtcattgcaccgaactgaatttg

SEQ ID NO: 123065 - DNA, 23 bp, Artificial Sequence
  primer
ttcatttcacttgtccagtttga

SEQ ID NO: 123066 - DNA, 41 bp, Artificial Sequence
  primer
gtaaaacgacggccagtaaatcaaatgtagcaatatggtgg

SEQ ID NO: 123067 - DNA, 21 bp, Artificial Sequence
  primer
tatccacattcttcccatcca

SEQ ID NO: 123068 - DNA, 40 bp, Artificial Sequence
  primer
gtaaaacgacggccagtaattggaacaacactgtttcagg

SEQ ID NO: 123069 - DNA, 38 bp, Artificial Sequence
  primer
gtaaaacgacggccagtgtgctttctatcaaccgaggg

SEQ ID NO: 123070 - DNA, 21 bp, Artificial Sequence
  primer
aagctaaaggagaccactgcg

SEQ ID NO: 123071 - DNA, 38 bp, Artificial Sequence
  primer
gtaaaacgacggccagtaaggaagaatggcgagcttag

SEQ ID NO: 123072 - DNA, 21 bp, Artificial Sequence
  primer
ctagtctcaagcgatcctccc

SEQ ID NO: 123073 - DNA, 38 bp, Artificial Sequence
  primer
gtaaaacgacggccagtatacatcctcaagctggctcc

SEQ ID NO: 123074 - DNA, 35 bp, Artificial Sequence
  primer
gtaaaacgacggccagtccgggtatgcagaggctg

SEQ ID NO: 123075 - DNA, 20 bp, Artificial Sequence
  primer
ctgcgaacgctagattggac

SEQ ID NO: 123076 - DNA, 38 bp, Artificial Sequence
  primer
gtaaaacgacggccagtgagttgagggctgcaagagtc

SEQ ID NO: 123077 - DNA, 38 bp, Artificial Sequence
  primer
gtaaaacgacggccagtcagagcagaagtgtgggacag

SEQ ID NO: 123078 - DNA, 20 bp, Artificial Sequence
  primer
aaggaaaggaaggcacatgg

SEQ ID NO: 123079 - DNA, 21 bp, Artificial Sequence
  primer
tcccttccaccagtactctgc

SEQ ID NO: 123080 - DNA, 21 bp, Artificial Sequence
  primer
actgctacctgccctctaacc

SEQ ID NO: 123081 - DNA, 21 bp, Artificial Sequence
  primer
gagcacagacagaaggaaggg

SEQ ID NO: 123082 - DNA, 20 bp, Artificial Sequence
  primer
gtccacaagagaaggagccc

SEQ ID NO: 123083 - DNA, 21 bp, Artificial Sequence
  primer
tgaccgactctgtgtcctgag

SEQ ID NO: 123084 - DNA, 21 bp, Artificial Sequence
  primer
gcatcctttgctctctgatcc

SEQ ID NO: 123085 - DNA, 38 bp, Artificial Sequence
  primer
gtaaaacgacggccagtgaatcctgtccctctgctctg

SEQ ID NO: 123086 - DNA, 21 bp, Artificial Sequence
  primer
cctaaatccaccacccttctc

SEQ ID NO: 123087 - DNA, 21 bp, Artificial Sequence
  primer
gaggacttcaagctcacccag

SEQ ID NO: 123088 - DNA, 37 bp, Artificial Sequence
  primer
gtaaaacgacggccagtctcaagcagggtggtgagag

SEQ ID NO: 123089 - DNA, 21 bp, Artificial Sequence
  primer
gcttgaacatgtccttcatgg

SEQ ID NO: 123090 - DNA, 38 bp, Artificial Sequence
  primer
gtaaaacgacggccagtatttatccagcaggtcaaccg

SEQ ID NO: 123091 - DNA, 21 bp, Artificial Sequence
  primer
gaattgcagtatgaacagcgg

SEQ ID NO: 123092 - DNA, 21 bp, Artificial Sequence
  primer
atccagtccgatatcacccag

SEQ ID NO: 123093 - DNA, 38 bp, Artificial Sequence
  primer
gtaaaacgacggccagtaatgatttccaccaggctctc

SEQ ID NO: 123094 - DNA, 21 bp, Artificial Sequence
  primer
tcagatcttggagttgcttgg

SEQ ID NO: 123095 - DNA, 22 bp, Artificial Sequence
  primer
cctcctccaagttacacagacg

SEQ ID NO: 123096 - DNA, 38 bp, Artificial Sequence
  primer
gtaaaacgacggccagtccaacattgtaccactgaggc

SEQ ID NO: 123097 - DNA, 39 bp, Artificial Sequence
  primer
gtaaaacgacggccagttggacactgcagttctggtatg

SEQ ID NO: 123098 - DNA, 20 bp, Artificial Sequence
  primer
atctcaagagatccacccgc

SEQ ID NO: 123099 - DNA, 38 bp, Artificial Sequence
  primer
gtaaaacgacggccagtggattacgggtgtgtgtgacc

SEQ ID NO: 123100 - DNA, 18 bp, Artificial Sequence
  primer
acaggcatgtgccaccac

SEQ ID NO: 123101 - DNA, 38 bp, Artificial Sequence
  primer
gtaaaacgacggccagtaccctgtctcaaacaaccacc

SEQ ID NO: 123102 - DNA, 22 bp, Artificial Sequence
  primer
gacgccaggtgtttgaataaag

SEQ ID NO: 123103 - DNA, 37 bp, Artificial Sequence
  primer
gtaaaacgacggccagtgcctccatggacttaggctc

SEQ ID NO: 123104 - DNA, 21 bp, Artificial Sequence
  primer
tggctctaagtgttcacgtcc

SEQ ID NO: 123105 - DNA, 19 bp, Artificial Sequence
  primer
agtgttgtgaacccgggag

SEQ ID NO: 123106 - DNA, 21 bp, Artificial Sequence
  primer
catcgcaaaggtcattcattc

SEQ ID NO: 123107 - DNA, 20 bp, Artificial Sequence
  primer
gaactgggctccctttgaac

SEQ ID NO: 123108 - DNA, 38 bp, Artificial Sequence
  primer
gtaaaacgacggccagtttattgctaaggcccaggttg

SEQ ID NO: 123109 - DNA, 21 bp, Artificial Sequence
  primer
tccagggaggatatgaaatgg

SEQ ID NO: 123110 - DNA, 23 bp, Artificial Sequence
  primer
cctgtaagagtggtgctaaaccc

SEQ ID NO: 123111 - DNA, 38 bp, Artificial Sequence
  primer
gtaaaacgacggccagtgattcctcccaacttgactgg

SEQ ID NO: 123112 - DNA, 21 bp, Artificial Sequence
  primer
caaacccaggtctctctggac

SEQ ID NO: 123113 - DNA, 21 bp, Artificial Sequence
  primer
gaaaggctgtcaactgctgtg

SEQ ID NO: 123114 - DNA, 24 bp, Artificial Sequence
  primer
cagccagtaagttccattagatgc

SEQ ID NO: 123115 - DNA, 38 bp, Artificial Sequence
  primer
gtaaaacgacggccagtctctgagtaagcagccttggg

SEQ ID NO: 123116 - DNA, 38 bp, Artificial Sequence
  primer
gtaaaacgacggccagtgacctgaaatgatccagccac

SEQ ID NO: 123117 - DNA, 38 bp, Artificial Sequence
  primer
gtaaaacgacggccagtcagaggtgtacttgcactggc

SEQ ID NO: 123118 - DNA, 20 bp, Artificial Sequence
  primer
atctacccgcctcagccttc

SEQ ID NO: 123119 - DNA, 38 bp, Artificial Sequence
  primer
gtaaaacgacggccagtgagtgtatgcaatgctccagg

SEQ ID NO: 123120 - DNA, 20 bp, Artificial Sequence
  primer
aacggaatctagagccacgg

SEQ ID NO: 123121 - DNA, 38 bp, Artificial Sequence
  primer
gtaaaacgacggccagttatctggcacttggctgaaac

SEQ ID NO: 123122 - DNA, 38 bp, Artificial Sequence
  primer
gtaaaacgacggccagtgtgaaccggaaagaagtcagg

SEQ ID NO: 123123 - DNA, 36 bp, Artificial Sequence
  primer
gtaaaacgacggccagttgtgcaggactcacttggc

SEQ ID NO: 123124 - DNA, 38 bp, Artificial Sequence
  primer
gtaaaacgacggccagtttgggaagaaatgaggtgagg

SEQ ID NO: 123125 - DNA, 38 bp, Artificial Sequence
  primer
gtaaaacgacggccagttggctctgtgatgtatggcac

SEQ ID NO: 123126 - DNA, 38 bp, Artificial Sequence
  primer
gtaaaacgacggccagtacagctgaagatggttgcctg

SEQ ID NO: 123127 - DNA, 21 bp, Artificial Sequence
  primer
cgaggtgtgtaggatgctcag

SEQ ID NO: 123128 - DNA, 22 bp, Artificial Sequence
  primer
tcagacttacagcatgacaggg

SEQ ID NO: 123129 - DNA, 39 bp, Artificial Sequence
  primer
gtaaaacgacggccagtaatctgaaatcgaacaagccac

SEQ ID NO: 123130 - DNA, 21 bp, Artificial Sequence
  primer
ctaggcagcaaacttcacagc

SEQ ID NO: 123131 - DNA, 21 bp, Artificial Sequence
  primer
gactgagaaaggatgcagcag

SEQ ID NO: 123132 - DNA, 38 bp, Artificial Sequence
  primer
gtaaaacgacggccagtacacgatcagtttgtgggatg

SEQ ID NO: 123133 - DNA, 38 bp, Artificial Sequence
  primer
gtaaaacgacggccagtccgtgatggaaagtcaaagtg

SEQ ID NO: 123134 - DNA, 38 bp, Artificial Sequence
  primer
gtaaaacgacggccagttcaggccagttcatactgacg

SEQ ID NO: 123135 - DNA, 21 bp, Artificial Sequence
  primer
ggcttggtgttaggacaggag

SEQ ID NO: 123136 - DNA, 40 bp, Artificial Sequence
  primer
gtaaaacgacggccagtctttgatctgacgtcatgtgttc

SEQ ID NO: 123137 - DNA, 37 bp, Artificial Sequence
  primer
gtaaaacgacggccagtgcctcagggtccctctcttc

SEQ ID NO: 123138 - DNA, 38 bp, Artificial Sequence
  primer
gtaaaacgacggccagtgaagaaactcttggagcctgg

SEQ ID NO: 123139 - DNA, 21 bp, Artificial Sequence
  primer
tcagcccaccagaaactacac

SEQ ID NO: 123140 - DNA, 28 bp, Artificial Sequence
  primer
caccttatcttctgagtatttaaatggg

SEQ ID NO: 123141 - DNA, 21 bp, Artificial Sequence
  primer
atcggctgtgtagactgaggc

SEQ ID NO: 123142 - DNA, 21 bp, Artificial Sequence
  primer
cccagggtgtcagtctatcag

SEQ ID NO: 123143 - DNA, 22 bp, Artificial Sequence
  primer
ggctctgaagtgctgttaggtg

SEQ ID NO: 123144 - DNA, 38 bp, Artificial Sequence
  primer
gtaaaacgacggccagtagctggtatcgtgaggaggtg

SEQ ID NO: 123145 - DNA, 20 bp, Artificial Sequence
  primer
cagctgagtggagacccaag

SEQ ID NO: 123146 - DNA, 38 bp, Artificial Sequence
  primer
gtaaaacgacggccagtagtgtttgaaggctttctggc

SEQ ID NO: 123147 - DNA, 36 bp, Artificial Sequence
  primer
gtaaaacgacggccagtgggattgaggtggcatgag

SEQ ID NO: 123148 - DNA, 21 bp, Artificial Sequence
  primer
acatttccgcaaaggtttctg

SEQ ID NO: 123149 - DNA, 37 bp, Artificial Sequence
  primer
gtaaaacgacggccagtccctgtggttacagagctgc

SEQ ID NO: 123150 - DNA, 38 bp, Artificial Sequence
  primer
gtaaaacgacggccagtaattctcgacgcaaactggag

SEQ ID NO: 123151 - DNA, 38 bp, Artificial Sequence
  primer
gtaaaacgacggccagtacaaggtaaacggagagtcgc

SEQ ID NO: 123152 - DNA, 21 bp, Artificial Sequence
  primer
ctgagtttggctcggatcttc

SEQ ID NO: 123153 - DNA, 38 bp, Artificial Sequence
  primer
gtaaaacgacggccagtaagtgggttcaacagcaaacc

SEQ ID NO: 123154 - DNA, 38 bp, Artificial Sequence
  primer
gtaaaacgacggccagtgaaagcatccacctgaagagg

SEQ ID NO: 123155 - DNA, 42 bp, Artificial Sequence
  primer
gtaaaacgacggccagtctggagtttaacgttagatgtcacc

SEQ ID NO: 123156 - DNA, 21 bp, Artificial Sequence
  primer
aagtaacctcagcaggttggg

SEQ ID NO: 123157 - DNA, 20 bp, Artificial Sequence
  primer
ggtatgaccaagggagcagg

SEQ ID NO: 123158 - DNA, 38 bp, Artificial Sequence
  primer
gtaaaacgacggccagttgctgtaaattcgtaacagcg

SEQ ID NO: 123159 - DNA, 38 bp, Artificial Sequence
  primer
gtaaaacgacggccagtactgtgacaacctccaggtcc

SEQ ID NO: 123160 - DNA, 21 bp, Artificial Sequence
  primer
tcaggacggcagttctctttc

SEQ ID NO: 123161 - DNA, 41 bp, Artificial Sequence
  primer
gtaaaacgacggccagttcctttagacaaagaatttgggtg

SEQ ID NO: 123162 - DNA, 23 bp, Artificial Sequence
  primer
tgacacccaactaccaaatcaag

SEQ ID NO: 123163 - DNA, 18 bp, Artificial Sequence
  primer
gagtcaccacacccagcc

SEQ ID NO: 123164 - DNA, 40 bp, Artificial Sequence
  primer
gtaaaacgacggccagtcctggagaaatgcataagtcctc

SEQ ID NO: 123165 - DNA, 21 bp, Artificial Sequence
  primer
agctcccagacaggcagtaag

SEQ ID NO: 123166 - DNA, 21 bp, Artificial Sequence
  primer
gatgggtacagtcaaagcagc

SEQ ID NO: 123167 - DNA, 38 bp, Artificial Sequence
  primer
gtaaaacgacggccagttagggtcaccatagcacttcc

SEQ ID NO: 123168 - DNA, 38 bp, Artificial Sequence
  primer
gtaaaacgacggccagtgccctccctaatttaaggctc

SEQ ID NO: 123169 - DNA, 21 bp, Artificial Sequence
  primer
ttggtttgcctaagtcattgc

SEQ ID NO: 123170 - DNA, 38 bp, Artificial Sequence
  primer
gtaaaacgacggccagtcaccagcaacaacacagagag

SEQ ID NO: 123171 - DNA, 39 bp, Artificial Sequence
  primer
gtaaaacgacggccagtcatctgaagtgaagcaaaccag

SEQ ID NO: 123172 - DNA, 38 bp, Artificial Sequence
  primer
gtaaaacgacggccagtaacgacccaattgccatctac

SEQ ID NO: 123173 - DNA, 43 bp, Artificial Sequence
  primer
gtaaaacgacggccagtacaaggtgctttactattaagggaag

SEQ ID NO: 123174 - DNA, 21 bp, Artificial Sequence
  primer
accaaggtaggaaggaggagg

SEQ ID NO: 123175 - DNA, 25 bp, Artificial Sequence
  primer
tttgtatgtgaaatcaagttcatgc

SEQ ID NO: 123176 - DNA, 47 bp, Artificial Sequence
  primer
gtaaaacgacggccagtggataactgaatagaagctgaatgttatac

SEQ ID NO: 123177 - DNA, 27 bp, Artificial Sequence
  primer
tgaaatttaaatcacaatatttagccc

SEQ ID NO: 123178 - DNA, 41 bp, Artificial Sequence
  primer
gtaaaacgacggccagttcagctatgagtaagactggcatc

SEQ ID NO: 123179 - DNA, 21 bp, Artificial Sequence
  primer
gacgagaaatgctccagaagg

SEQ ID NO: 123180 - DNA, 38 bp, Artificial Sequence
  primer
gtaaaacgacggccagtccagactcaggacaaagaggc

SEQ ID NO: 123181 - DNA, 21 bp, Artificial Sequence
  primer
cctggtgtctgatcctatccc

SEQ ID NO: 123182 - DNA, 38 bp, Artificial Sequence
  primer
gtaaaacgacggccagtgatttgctcagttccaggctc

SEQ ID NO: 123183 - DNA, 21 bp, Artificial Sequence
  primer
caagggaaaccacaccttctc

SEQ ID NO: 123184 - DNA, 22 bp, Artificial Sequence
  primer
aaagctcccattctttacctgc

SEQ ID NO: 123185 - DNA, 21 bp, Artificial Sequence
  primer
ccactggaccaatcacacatc

SEQ ID NO: 123186 - DNA, 38 bp, Artificial Sequence
  primer
gtaaaacgacggccagttcaatgcagggtgttagatgg

SEQ ID NO: 123187 - DNA, 38 bp, Artificial Sequence
  primer
gtaaaacgacggccagtgggataacaggtaaggagggc

SEQ ID NO: 123188 - DNA, 21 bp, Artificial Sequence
  primer
atctagggccaagacccaaag

SEQ ID NO: 123189 - DNA, 21 bp, Artificial Sequence
  primer
gaagcattagcatcgtgcaac

SEQ ID NO: 123190 - DNA, 21 bp, Artificial Sequence
  primer
acatgccaagaggtttcactg

SEQ ID NO: 123191 - DNA, 21 bp, Artificial Sequence
  primer
tggaacagctagaggaacgtg

SEQ ID NO: 123192 - DNA, 21 bp, Artificial Sequence
  primer
tggatagttggcacaatctgg

SEQ ID NO: 123193 - DNA, 21 bp, Artificial Sequence
  primer
ctgcgcttctctacattccag

SEQ ID NO: 123194 - DNA, 21 bp, Artificial Sequence
  primer
gccactcaagtatctcctggg

SEQ ID NO: 123195 - DNA, 38 bp, Artificial Sequence
  primer
gtaaaacgacggccagtccatccttcccttccctttag

SEQ ID NO: 123196 - DNA, 22 bp, Artificial Sequence
  primer
ccaggacataagccctaactgg

SEQ ID NO: 123197 - DNA, 38 bp, Artificial Sequence
  primer
gtaaaacgacggccagtatgcccaccacactaaacctc

SEQ ID NO: 123198 - DNA, 36 bp, Artificial Sequence
  primer
gtaaaacgacggccagtacaactcaggttcgctggg

SEQ ID NO: 123199 - DNA, 38 bp, Artificial Sequence
  primer
gtaaaacgacggccagtgccttggtttgtgaactgctc

SEQ ID NO: 123200 - DNA, 39 bp, Artificial Sequence
  primer
gtaaaacgacggccagttttcctatcgtttcagtttggc

SEQ ID NO: 123201 - DNA, 20 bp, Artificial Sequence
  primer
aaacacactggaagctgctg

SEQ ID NO: 123202 - DNA, 20 bp, Artificial Sequence
  primer
atggaggcatgctgtctcag

SEQ ID NO: 123203 - DNA, 21 bp, Artificial Sequence
  primer
ggaatagggtttctccagtgc

SEQ ID NO: 123204 - DNA, 21 bp, Artificial Sequence
  primer
taagccctcttggcaggtatg

SEQ ID NO: 123205 - DNA, 38 bp, Artificial Sequence
  primer
gtaaaacgacggccagtgaccgcatcaatcatagaacc

SEQ ID NO: 123206 - DNA, 21 bp, Artificial Sequence
  primer
ctaacccaattcccacagtgc

SEQ ID NO: 123207 - DNA, 38 bp, Artificial Sequence
  primer
gtaaaacgacggccagttgcatgccaagatccaagtag

SEQ ID NO: 123208 - DNA, 21 bp, Artificial Sequence
  primer
aatgtgtagaagcgagagccc

SEQ ID NO: 123209 - DNA, 38 bp, Artificial Sequence
  primer
gtaaaacgacggccagtgttcacttactgcccaggtcc

SEQ ID NO: 123210 - DNA, 20 bp, Artificial Sequence
  primer
agtcctgccttctaccctcg

SEQ ID NO: 123211 - DNA, 36 bp, Artificial Sequence
  primer
gtaaaacgacggccagtagagggtgcagtgaatggg

SEQ ID NO: 123212 - DNA, 37 bp, Artificial Sequence
  primer
gtaaaacgacggccagtgctccatcagatcctctggg

SEQ ID NO: 123213 - DNA, 38 bp, Artificial Sequence
  primer
gtaaaacgacggccagtccaaacactgtggcagagaag

SEQ ID NO: 123214 - DNA, 38 bp, Artificial Sequence
  primer
gtaaaacgacggccagtaatgttagggcttggaaaggg

SEQ ID NO: 123215 - DNA, 21 bp, Artificial Sequence
  primer
cttgggacttacaggaggcag

SEQ ID NO: 123216 - DNA, 21 bp, Artificial Sequence
  primer
caagaacctgggtttctcctc

SEQ ID NO: 123217 - DNA, 38 bp, Artificial Sequence
  primer
gtaaaacgacggccagtgggtggtttcaaatgcaagag

SEQ ID NO: 123218 - DNA, 20 bp, Artificial Sequence
  primer
ggtctaggccactctgctcc

SEQ ID NO: 123219 - DNA, 38 bp, Artificial Sequence
  primer
gtaaaacgacggccagtaagaagcaatgcattaacggg

SEQ ID NO: 123220 - DNA, 21 bp, Artificial Sequence
  primer
atgataggttctccggtgtcc

SEQ ID NO: 123221 - DNA, 18 bp, Artificial Sequence
  primer
agagatcggccgcacaac

SEQ ID NO: 123222 - DNA, 21 bp, Artificial Sequence
  primer
aagatcacagggatagggtgg

SEQ ID NO: 123223 - DNA, 38 bp, Artificial Sequence
  primer
gtaaaacgacggccagtagcagaaggccagaaattcac

SEQ ID NO: 123224 - DNA, 38 bp, Artificial Sequence
  primer
gtaaaacgacggccagtaaccatgttgccgtggttaag

SEQ ID NO: 123225 - DNA, 37 bp, Artificial Sequence
  primer
gtaaaacgacggccagtctcagctcgatgccacattc

SEQ ID NO: 123226 - DNA, 22 bp, Artificial Sequence
  primer
aagctactcaaatgccaagcag

SEQ ID NO: 123227 - DNA, 38 bp, Artificial Sequence
  primer
gtaaaacgacggccagtgacattcttgagctggagcag

SEQ ID NO: 123228 - DNA, 21 bp, Artificial Sequence
  primer
agtatcacgtaaaggcaggcg

SEQ ID NO: 123229 - DNA, 38 bp, Artificial Sequence
  primer
gtaaaacgacggccagtggcagggaatacaactgcttc

SEQ ID NO: 123230 - DNA, 21 bp, Artificial Sequence
  primer
agactcaatcttctcgccctg

SEQ ID NO: 123231 - DNA, 38 bp, Artificial Sequence
  primer
gtaaaacgacggccagtggaaataaccaagcgagggtc

SEQ ID NO: 123232 - DNA, 38 bp, Artificial Sequence
  primer
gtaaaacgacggccagttagccaggaggtcactatcgg

SEQ ID NO: 123233 - DNA, 21 bp, Artificial Sequence
  primer
acagtcagagtgaaattgcgg

SEQ ID NO: 123234 - DNA, 20 bp, Artificial Sequence
  primer
accaccacgaccttgttcag

SEQ ID NO: 123235 - DNA, 38 bp, Artificial Sequence
  primer
gtaaaacgacggccagtgcaaacccttcaggaagaaag

SEQ ID NO: 123236 - DNA, 21 bp, Artificial Sequence
  primer
tcagccctgactatctgcaag

SEQ ID NO: 123237 - DNA, 21 bp, Artificial Sequence
  primer
aactgtacaggcagccctctc

SEQ ID NO: 123238 - DNA, 22 bp, Artificial Sequence
  primer
ttctgatttctatccattgccc

SEQ ID NO: 123239 - DNA, 38 bp, Artificial Sequence
  primer
gtaaaacgacggccagtacttcaagataaaggcagcgg

SEQ ID NO: 123240 - DNA, 21 bp, Artificial Sequence
  primer
tgaaacgaaaccaatctacgc

SEQ ID NO: 123241 - DNA, 21 bp, Artificial Sequence
  primer
gcaacatttcagcaaccactt

SEQ ID NO: 123242 - DNA, 38 bp, Artificial Sequence
  primer
gtaaaacgacggccagtaaccacatcacaaattccagc

SEQ ID NO: 123243 - DNA, 22 bp, Artificial Sequence
  primer
tgacaacacgttctaaattggc

SEQ ID NO: 123244 - DNA, 21 bp, Artificial Sequence
  primer
ctctaagcccaatccagttgc

SEQ ID NO: 123245 - DNA, 44 bp, Artificial Sequence
  primer
gtaaaacgacggccagtgccttaggaaagctctcacttataaac

SEQ ID NO: 123246 - DNA, 26 bp, Artificial Sequence
  primer
tgcttgacttatatttagtccttgcc

SEQ ID NO: 123247 - DNA, 23 bp, Artificial Sequence
  primer
gcatctgataccttaaccactgc

SEQ ID NO: 123248 - DNA, 26 bp, Artificial Sequence
  primer
tgaacaaagtgtatcttattgccaaa

SEQ ID NO: 123249 - DNA, 38 bp, Artificial Sequence
  primer
gtaaaacgacggccagtggaaagccatctgttccaaag

SEQ ID NO: 123250 - DNA, 21 bp, Artificial Sequence
  primer
ggctccagtgcaatatttctg

SEQ ID NO: 123251 - DNA, 22 bp, Artificial Sequence
  primer
aatgctgggatgagctgagtag

SEQ ID NO: 123252 - DNA, 23 bp, Artificial Sequence
  primer
ggtcttaacgttagccagtcaag

SEQ ID NO: 123253 - DNA, 23 bp, Artificial Sequence
  primer
tggaacctgtttaaatgatccag

SEQ ID NO: 123254 - DNA, 37 bp, Artificial Sequence
  primer
gtaaaacgacggccagtaccaggcggaaattgctaag

SEQ ID NO: 123255 - DNA, 21 bp, Artificial Sequence
  primer
ttcaaaccgaggctcctattc

SEQ ID NO: 123256 - DNA, 21 bp, Artificial Sequence
  primer
ctctaagcccaatccagttgc

SEQ ID NO: 123257 - DNA, 23 bp, Artificial Sequence
  primer
cattgccatattaccaacaaacc

SEQ ID NO: 123258 - DNA, 21 bp, Artificial Sequence
  primer
ggatgcgtgtctgttgcttac

SEQ ID NO: 123259 - DNA, 21 bp, Artificial Sequence
  primer
agctaggaagtgctacggctg

SEQ ID NO: 123260 - DNA, 39 bp, Artificial Sequence
  primer
gtaaaacgacggccagttgggttcaatttccaattcttg

SEQ ID NO: 123261 - DNA, 38 bp, Artificial Sequence
  primer
gtaaaacgacggccagttccactcctcgagatagagcc

SEQ ID NO: 123262 - DNA, 21 bp, Artificial Sequence
  primer
ctaagaggcaggttcccaatg

SEQ ID NO: 123263 - DNA, 21 bp, Artificial Sequence
  primer
cacatccatgaatgacccttg

SEQ ID NO: 123264 - DNA, 38 bp, Artificial Sequence
  primer
gtaaaacgacggccagtcttggacaacctcatgcttcc

SEQ ID NO: 123265 - DNA, 21 bp, Artificial Sequence
  primer
atttccaggacaaactggctg

SEQ ID NO: 123266 - DNA, 21 bp, Artificial Sequence
  primer
aactgcacaggaaagctaggg

SEQ ID NO: 123267 - DNA, 37 bp, Artificial Sequence
  primer
gtaaaacgacggccagtaaagtcccagttctggctgg

SEQ ID NO: 123268 - DNA, 38 bp, Artificial Sequence
  primer
gtaaaacgacggccagttgggctggtactgaacttgtg

SEQ ID NO: 123269 - DNA, 21 bp, Artificial Sequence
  primer
tttgaggagtccaattctccc

SEQ ID NO: 123270 - DNA, 21 bp, Artificial Sequence
  primer
acactccatccatttctgtgg

SEQ ID NO: 123271 - DNA, 38 bp, Artificial Sequence
  primer
gtaaaacgacggccagtatggaaggagcccttgaagac

SEQ ID NO: 123272 - DNA, 21 bp, Artificial Sequence
  primer
tgtccaacatctgggtctctg

SEQ ID NO: 123273 - DNA, 41 bp, Artificial Sequence
  primer
gtaaaacgacggccagttttcttgaaaggaaacaaggaatc

SEQ ID NO: 123274 - DNA, 38 bp, Artificial Sequence
  primer
gtaaaacgacggccagtaaagcatgcccatacgctaat

SEQ ID NO: 123275 - DNA, 22 bp, Artificial Sequence
  primer
aggagggctcaaggataaacac

SEQ ID NO: 123276 - DNA, 21 bp, Artificial Sequence
  primer
aaatgatccattgcagacacc

SEQ ID NO: 123277 - DNA, 39 bp, Artificial Sequence
  primer
gtaaaacgacggccagttgtaaagaatgatgcatggctg

SEQ ID NO: 123278 - DNA, 21 bp, Artificial Sequence
  primer
actcctaagctgtggtttgcc

SEQ ID NO: 123279 - DNA, 22 bp, Artificial Sequence
  primer
tccacagcccatactattcctg

SEQ ID NO: 123280 - DNA, 20 bp, Artificial Sequence
  primer
cctcacctcagagggaaagc

SEQ ID NO: 123281 - DNA, 21 bp, Artificial Sequence
  primer
tttgctcaggaattaaagggc

SEQ ID NO: 123282 - DNA, 21 bp, Artificial Sequence
  primer
tttgcaagccatttgttgaag

SEQ ID NO: 123283 - DNA, 43 bp, Artificial Sequence
  primer
gtaaaacgacggccagttctccatatccaccctatctaaacac

SEQ ID NO: 123284 - DNA, 21 bp, Artificial Sequence
  primer
ctacccactccctatcccaac

SEQ ID NO: 123285 - DNA, 40 bp, Artificial Sequence
  primer
gtaaaacgacggccagtgaatctaaggaatccctggaaag

SEQ ID NO: 123286 - DNA, 40 bp, Artificial Sequence
  primer
gtaaaacgacggccagtgagaatggcttatcctgaactgg

SEQ ID NO: 123287 - DNA, 44 bp, Artificial Sequence
  primer
gtaaaacgacggccagttgttgtgaggactgtaggtattacaaa

SEQ ID NO: 123288 - DNA, 21 bp, Artificial Sequence
  primer
gggcacatctcaggtttaatg

SEQ ID NO: 123289 - DNA, 21 bp, Artificial Sequence
  primer
gccagcattccatggataaag

SEQ ID NO: 123290 - DNA, 21 bp, Artificial Sequence
  primer
gttgagaagcactgacctggg

SEQ ID NO: 123291 - DNA, 22 bp, Artificial Sequence
  primer
tccaaaggtctgtttcatggtc

SEQ ID NO: 123292 - DNA, 39 bp, Artificial Sequence
  primer
gtaaaacgacggccagtcgctagccagcatgatatacag

SEQ ID NO: 123293 - DNA, 41 bp, Artificial Sequence
  primer
gtaaaacgacggccagtccttggatataatgctgatttgtg

SEQ ID NO: 123294 - DNA, 25 bp, Artificial Sequence
  primer
tcataaccaactgctgtcaataaac

SEQ ID NO: 123295 - DNA, 21 bp, Artificial Sequence
  primer
atgttgcttattcccgaggag

SEQ ID NO: 123296 - DNA, 21 bp, Artificial Sequence
  primer
acatgtgggtgtctccatttc

SEQ ID NO: 123297 - DNA, 21 bp, Artificial Sequence
  primer
ggactgagtttgggaaagtcc

SEQ ID NO: 123298 - DNA, 21 bp, Artificial Sequence
  primer
tggtttcctgctgatgttacg

SEQ ID NO: 123299 - DNA, 40 bp, Artificial Sequence
  primer
gtaaaacgacggccagtccttattctgggagagtatgcac

SEQ ID NO: 123300 - DNA, 38 bp, Artificial Sequence
  primer
gtaaaacgacggccagtcaattatctgggagctttccg

SEQ ID NO: 123301 - DNA, 42 bp, Artificial Sequence
  primer
gtaaaacgacggccagttgcctatcacaaagtagttccattc

SEQ ID NO: 123302 - DNA, 41 bp, Artificial Sequence
  primer
gtaaaacgacggccagtaagagaagatttcacagactgcaa

SEQ ID NO: 123303 - DNA, 21 bp, Artificial Sequence
  primer
agcaaagccaacaatctcctc

SEQ ID NO: 123304 - DNA, 22 bp, Artificial Sequence
  primer
aaaggtttgcactacttgcagc

SEQ ID NO: 123305 - DNA, 21 bp, Artificial Sequence
  primer
ccaatttatgtgacggtggtg

SEQ ID NO: 123306 - DNA, 21 bp, Artificial Sequence
  primer
catgcacatgcactgaaattg

SEQ ID NO: 123307 - DNA, 26 bp, Artificial Sequence
  primer
ttcttaatgtcactaggcaacagttc

SEQ ID NO: 123308 - DNA, 21 bp, Artificial Sequence
  primer
tcatttgtcaagctgccattg

SEQ ID NO: 123309 - DNA, 38 bp, Artificial Sequence
  primer
gtaaaacgacggccagttgtgtagagccagaggcattg

SEQ ID NO: 123310 - DNA, 21 bp, Artificial Sequence
  primer
gccaaacctttgcattattcg

SEQ ID NO: 123311 - DNA, 18 bp, Artificial Sequence
  primer
gaacctgcgaggtggagc

SEQ ID NO: 123312 - DNA, 38 bp, Artificial Sequence
  primer
gtaaaacgacggccagttgtgagccaccataccttgtc

SEQ ID NO: 123313 - DNA, 38 bp, Artificial Sequence
  primer
gtaaaacgacggccagttaccctaagaggagctctggc

SEQ ID NO: 123314 - DNA, 21 bp, Artificial Sequence
  primer
aagcaagatggcaagatgatg

SEQ ID NO: 123315 - DNA, 22 bp, Artificial Sequence
  primer
ccaacagcctttaataggcaac

SEQ ID NO: 123316 - DNA, 39 bp, Artificial Sequence
  primer
gtaaaacgacggccagtggcaaatcataatgcccttacc

SEQ ID NO: 123317 - DNA, 22 bp, Artificial Sequence
  primer
cgttagaacagaagccaggaac

SEQ ID NO: 123318 - DNA, 38 bp, Artificial Sequence
  primer
gtaaaacgacggccagtagtgctgtgtactggctcacg

SEQ ID NO: 123319 - DNA, 18 bp, Artificial Sequence
  primer
tcaggcagtgatcctggg

SEQ ID NO: 123320 - DNA, 21 bp, Artificial Sequence
  primer
ccagacacacagcctggtaag

SEQ ID NO: 123321 - DNA, 21 bp, Artificial Sequence
  primer
gctgatctaaggcacagaccc

SEQ ID NO: 123322 - DNA, 21 bp, Artificial Sequence
  primer
cagagaattctgcaatctgcg

SEQ ID NO: 123323 - DNA, 38 bp, Artificial Sequence
  primer
gtaaaacgacggccagtgccataagcagtaaagggcac

SEQ ID NO: 123324 - DNA, 21 bp, Artificial Sequence
  primer
tggaaagagaatgcttgggac

SEQ ID NO: 123325 - DNA, 38 bp, Artificial Sequence
  primer
gtaaaacgacggccagtgtactgcaaacggttctgtgg

SEQ ID NO: 123326 - DNA, 21 bp, Artificial Sequence
  primer
ggcagagggtagaggctacag

SEQ ID NO: 123327 - DNA, 39 bp, Artificial Sequence
  primer
gtaaaacgacggccagtttcaacaacgaatggaaatcac

SEQ ID NO: 123328 - DNA, 21 bp, Artificial Sequence
  primer
atcagaacaagggacacagcc

SEQ ID NO: 123329 - DNA, 21 bp, Artificial Sequence
  primer
gcctcactacagagggagtgg

SEQ ID NO: 123330 - DNA, 26 bp, Artificial Sequence
  primer
cctaagcttccaagtattcactcatc

SEQ ID NO: 123331 - DNA, 40 bp, Artificial Sequence
  primer
gtaaaacgacggccagtcccaataaccaaacaaatgttcc

SEQ ID NO: 123332 - DNA, 20 bp, Artificial Sequence
  primer
tacaggcatgagccacaatg

SEQ ID NO: 123333 - DNA, 41 bp, Artificial Sequence
  primer
gtaaaacgacggccagttcatgccctatatgcttcataaac

SEQ ID NO: 123334 - DNA, 38 bp, Artificial Sequence
  primer
gtaaaacgacggccagtcaagcaatctgcccaccttag

SEQ ID NO: 123335 - DNA, 38 bp, Artificial Sequence
  primer
gtaaaacgacggccagtccgctacattgattccatttg

SEQ ID NO: 123336 - DNA, 47 bp, Artificial Sequence
  primer
gtaaaacgacggccagtttctagttgtaataaatgatagcactctcc

SEQ ID NO: 123337 - DNA, 38 bp, Artificial Sequence
  primer
gtaaaacgacggccagtcataacagcatgggtgcagac

SEQ ID NO: 123338 - DNA, 38 bp, Artificial Sequence
  primer
gtaaaacgacggccagtgcaggaaacagaaacaacaca

SEQ ID NO: 123339 - DNA, 41 bp, Artificial Sequence
  primer
gtaaaacgacggccagttctttgtttggacaacgagtacag

SEQ ID NO: 123340 - DNA, 21 bp, Artificial Sequence
  primer
ccaacaacagcccttaggaag

SEQ ID NO: 123341 - DNA, 38 bp, Artificial Sequence
  primer
gtaaaacgacggccagtactcacaccttccagtcagcc

SEQ ID NO: 123342 - DNA, 20 bp, Artificial Sequence
  primer
aagggagtgctcccatgttc

SEQ ID NO: 123343 - DNA, 37 bp, Artificial Sequence
  primer
gtaaaacgacggccagtcaagggtgcattacccagag

SEQ ID NO: 123344 - DNA, 21 bp, Artificial Sequence
  primer
tttccaatcaaacccacagac

SEQ ID NO: 123345 - DNA, 37 bp, Artificial Sequence
  primer
gtaaaacgacggccagtctcgtttctgaacactcggc

SEQ ID NO: 123346 - DNA, 19 bp, Artificial Sequence
  primer
agtgagcatgaagacgggc

SEQ ID NO: 123347 - DNA, 39 bp, Artificial Sequence
  primer
gtaaaacgacggccagtaaccctcctttgtccagagttc

SEQ ID NO: 123348 - DNA, 26 bp, Artificial Sequence
  primer
ttcaacaaggacaagttcaagtattc

SEQ ID NO: 123349 - DNA, 44 bp, Artificial Sequence
  primer
gtaaaacgacggccagtttgtaataaatgatagcactctccaag

SEQ ID NO: 123350 - DNA, 21 bp, Artificial Sequence
  primer
tgcagagatgagagggtttcc

SEQ ID NO: 123351 - DNA, 20 bp, Artificial Sequence
  primer
gtgaccctcaagggacttgg

SEQ ID NO: 123352 - DNA, 40 bp, Artificial Sequence
  primer
gtaaaacgacggccagtaagcagaaaggaaattcaggaac

SEQ ID NO: 123353 - DNA, 42 bp, Artificial Sequence
  primer
gtaaaacgacggccagttgacttaagattgtttcattaggcg

SEQ ID NO: 123354 - DNA, 21 bp, Artificial Sequence
  primer
ttggtgtcactgttacctgcc

SEQ ID NO: 123355 - DNA, 38 bp, Artificial Sequence
  primer
gtaaaacgacggccagtttgctattccaagtgtcaggc

SEQ ID NO: 123356 - DNA, 21 bp, Artificial Sequence
  primer
ttcttcctctgtgaaatgccc

SEQ ID NO: 123357 - DNA, 37 bp, Artificial Sequence
  primer
gtaaaacgacggccagtctcctgcttggtgtcgtagc

SEQ ID NO: 123358 - DNA, 38 bp, Artificial Sequence
  primer
gtaaaacgacggccagtgacacttcaccttcccacctc

SEQ ID NO: 123359 - DNA, 38 bp, Artificial Sequence
  primer
gtaaaacgacggccagtggcataaatggtgtgggattc

SEQ ID NO: 123360 - DNA, 40 bp, Artificial Sequence
  primer
gtaaaacgacggccagtaattgcgtaaacaccatcacttc

SEQ ID NO: 123361 - DNA, 40 bp, Artificial Sequence
  primer
gtaaaacgacggccagtgggtttatttccacatagcagtg

SEQ ID NO: 123362 - DNA, 24 bp, Artificial Sequence
  primer
tgcatccaaattaggctttaagtg

SEQ ID NO: 123363 - DNA, 38 bp, Artificial Sequence
  primer
gtaaaacgacggccagtttcatcgtgagcataagctgg

SEQ ID NO: 123364 - DNA, 22 bp, Artificial Sequence
  primer
gggtttgtggtaagtaggtggg

SEQ ID NO: 123365 - DNA, 38 bp, Artificial Sequence
  primer
gtaaaacgacggccagtgaccctccctcagcatgtatc

SEQ ID NO: 123366 - DNA, 21 bp, Artificial Sequence
  primer
tgtgtatccagagatgcctcc

SEQ ID NO: 123367 - DNA, 21 bp, Artificial Sequence
  primer
atggtcagcttgagtgacagg

SEQ ID NO: 123368 - DNA, 21 bp, Artificial Sequence
  primer
ctgttctgatgctgggagacc

SEQ ID NO: 123369 - DNA, 21 bp, Artificial Sequence
  primer
ataacgcatggagagattggc

SEQ ID NO: 123370 - DNA, 38 bp, Artificial Sequence
  primer
gtaaaacgacggccagtagctacatgacttgacagggc

SEQ ID NO: 123371 - DNA, 39 bp, Artificial Sequence; identical to SEQ ID NO: 13002
  primer

SEQ ID NO: 123372 - DNA, 21 bp, Artificial Sequence
  primer
tggcacagtgaactcaacacc

SEQ ID NO: 123373 - DNA, 21 bp, Artificial Sequence
  primer
gaaggtttctgagctcctccc

SEQ ID NO: 123374 - DNA, 21 bp, Artificial Sequence
  primer
aagcagcagcaaatacacgag

SEQ ID NO: 123375 - DNA, 38 bp, Artificial Sequence
  primer
gtaaaacgacggccagtggataagggcacaaagtctgg

SEQ ID NO: 123376 - DNA, 21 bp, Artificial Sequence
  primer
tcaaagagctccaaagtgcag

SEQ ID NO: 123377 - DNA, 20 bp, Artificial Sequence
  primer
accctgttgcctgttcttcc

SEQ ID NO: 123378 - DNA, 38 bp, Artificial Sequence
  primer
gtaaaacgacggccagtactcactcacggcacctacag

SEQ ID NO: 123379 - DNA, 21 bp, Artificial Sequence
  primer
cagctcttggtgttagatggg

SEQ ID NO: 123380 - DNA, 21 bp, Artificial Sequence
  primer
gctacagaagcacagagtgcg

SEQ ID NO: 123381 - DNA, 20 bp, Artificial Sequence
  primer
aatgcagatgataggcggtg

SEQ ID NO: 123382 - DNA, 21 bp, Artificial Sequence
  primer
aacaagttccaggccactcag

SEQ ID NO: 123383 - DNA, 21 bp, Artificial Sequence
  primer
cctagtcacctggacccacag

SEQ ID NO: 123384 - DNA, 21 bp, Artificial Sequence
  primer
ctcgtgggcacttagacacag

SEQ ID NO: 123385 - DNA, 21 bp, Artificial Sequence
  primer
gacaaggcttccctgctctac

SEQ ID NO: 123386 - DNA, 21 bp, Artificial Sequence
  primer
ttccaaagggtattgtggagg

SEQ ID NO: 123387 - DNA, 38 bp, Artificial Sequence
  primer
gtaaaacgacggccagtgtctccgagtatccagcaacc

SEQ ID NO: 123388 - DNA, 19 bp, Artificial Sequence
  primer
ctctccttcctggcacacc

SEQ ID NO: 123389 - DNA, 37 bp, Artificial Sequence
  primer
gtaaaacgacggccagtagcttgccttggtgtctgag

SEQ ID NO: 123390 - DNA, 21 bp, Artificial Sequence
  primer
gtcgcagtactcccagctcag

SEQ ID NO: 123391 - DNA, 19 bp, Artificial Sequence
  primer
gttcctggtcagggaaggc

SEQ ID NO: 123392 - DNA, 37 bp, Artificial Sequence
  primer
gtaaaacgacggccagtagaaggtagggcacgggttc

SEQ ID NO: 123393 - DNA, 37 bp, Artificial Sequence
  primer
gtaaaacgacggccagtaaggcgcaacagagctaacc

SEQ ID NO: 123394 - DNA, 38 bp, Artificial Sequence
  primer
gtaaaacgacggccagttctcacaacccatcaggtcag

SEQ ID NO: 123395 - DNA, 37 bp, Artificial Sequence
  primer
gtaaaacgacggccagtctctgcagcttggtcctcac

SEQ ID NO: 123396 - DNA, 21 bp, Artificial Sequence
  primer
atgggacacaatcttgccttc

SEQ ID NO: 123397 - DNA, 40 bp, Artificial Sequence
  primer
gtaaaacgacggccagttggagacagaggatgtttacctg

SEQ ID NO: 123398 - DNA, 21 bp, Artificial Sequence
  primer
aactgtgcctgtacccacctc

SEQ ID NO: 123399 - DNA, 39 bp, Artificial Sequence
  primer
gtaaaacgacggccagtgagctgggagtataggcatgtg

SEQ ID NO: 123400 - DNA, 21 bp, Artificial Sequence
  primer
cctatgctctctgccttggag

SEQ ID NO: 123401 - DNA, 22 bp, Artificial Sequence
  primer
ttccaggagctataactgggtg

SEQ ID NO: 123402 - DNA, 21 bp, Artificial Sequence
  primer
tacatcccagaatggctcacc

SEQ ID NO: 123403 - DNA, 38 bp, Artificial Sequence
  primer
gtaaaacgacggccagtctgtgctgttgaatggtcctc

SEQ ID NO: 123404 - DNA, 21 bp, Artificial Sequence
  primer
ccaggaagcacacttcagatg

SEQ ID NO: 123405 - DNA, 21 bp, Artificial Sequence
  primer
tttgtcaacacgaagcatacg

SEQ ID NO: 123406 - DNA, 21 bp, Artificial Sequence
  primer
ccagtgcattctctggaactc

SEQ ID NO: 123407 - DNA, 38 bp, Artificial Sequence
  primer
gtaaaacgacggccagttaacgggcattaacacctagc

SEQ ID NO: 123408 - DNA, 22 bp, Artificial Sequence
  primer
tttgagcaggacattcattcac

SEQ ID NO: 123409 - DNA, 38 bp, Artificial Sequence
  primer
gtaaaacgacggccagtactccacgccctacagaaatg

SEQ ID NO: 123410 - DNA, 38 bp, Artificial Sequence
  primer
gtaaaacgacggccagttaacttccttgccgaatagcc

SEQ ID NO: 123411 - DNA, 22 bp, Artificial Sequence
  primer
ttagatcctggtctcctatgcc

SEQ ID NO: 123412 - DNA, 21 bp, Artificial Sequence
  primer
aggtttaaccgctttccattt

SEQ ID NO: 123413 - DNA, 40 bp, Artificial Sequence
  primer
gtaaaacgacggccagttcaacttcctgcattgtagacat

SEQ ID NO: 123414 - DNA, 40 bp, Artificial Sequence
  primer
gtaaaacgacggccagtggtgaaacataatgagcatgaca

SEQ ID NO: 123415 - DNA, 25 bp, Artificial Sequence
  primer
ggtgggatatattaaagattgctga

SEQ ID NO: 123416 - DNA, 38 bp, Artificial Sequence
  primer
gtaaaacgacggccagttcctcacaggctaccttctcc

SEQ ID NO: 123417 - DNA, 24 bp, Artificial Sequence
  primer
ttctaatttgcctaagcagtggtc

SEQ ID NO: 123418 - DNA, 26 bp, Artificial Sequence
  primer
gggactttctacttaaagaaatgaga

SEQ ID NO: 123419 - DNA, 38 bp, Artificial Sequence
  primer
gtaaaacgacggccagtgcacattctgcacttgtgtct

SEQ ID NO: 123420 - DNA, 23 bp, Artificial Sequence
  primer
ttatagcccataccaacctgatg

SEQ ID NO: 123421 - DNA, 24 bp, Artificial Sequence
  primer
tgcaattgccataaagtatgagtg

SEQ ID NO: 123422 - DNA, 40 bp, Artificial Sequence
  primer
gtaaaacgacggccagtaataacgaaatgttcagcacaaa

SEQ ID NO: 123423 - DNA, 21 bp, Artificial Sequence
  primer
tgacttcttccctaagctggc

SEQ ID NO: 123424 - DNA, 38 bp, Artificial Sequence
  primer
gtaaaacgacggccagtggctcagagttgaaatgaggc

SEQ ID NO: 123425 - DNA, 20 bp, Artificial Sequence
  primer
atgaacagatgggagggacc

SEQ ID NO: 123426 - DNA, 19 bp, Artificial Sequence
  primer
accagccacactccaaacc

SEQ ID NO: 123427 - DNA, 38 bp, Artificial Sequence
  primer
gtaaaacgacggccagtccaggatgggtagtggagttg

SEQ ID NO: 123428 - DNA, 21 bp, Artificial Sequence
  primer
tattcttggttcccatcccag

SEQ ID NO: 123429 - DNA, 40 bp, Artificial Sequence
  primer
gtaaaacgacggccagtggtaagcgttcgataagcagaag

SEQ ID NO: 123430 - DNA, 38 bp, Artificial Sequence
  primer
gtaaaacgacggccagtgtcctccagcgacttcttctc

SEQ ID NO: 123431 - DNA, 21 bp, Artificial Sequence
  primer
aaacaacccatctcatgtggc

SEQ ID NO: 123432 - DNA, 38 bp, Artificial Sequence
  primer
gtaaaacgacggccagtaacatcctatgtgtcccggag

SEQ ID NO: 123433 - DNA, 21 bp, Artificial Sequence
  primer
ggttcactccaagaaaccgag

SEQ ID NO: 123434 - DNA, 21 bp, Artificial Sequence
  primer
caaagtcacatggcttgaacc

SEQ ID NO: 123435 - DNA, 21 bp, Artificial Sequence
  primer
ataccagcggttgttaaaggg

SEQ ID NO: 123436 - DNA, 21 bp, Artificial Sequence
  primer
tgaatagcactgggagcattg

SEQ ID NO: 123437 - DNA, 21 bp, Artificial Sequence
  primer
ctgcctgatacagcgattgtc

SEQ ID NO: 123438 - DNA, 38 bp, Artificial Sequence
  primer
gtaaaacgacggccagttctctcagctcagggttccag

SEQ ID NO: 123439 - DNA, 38 bp, Artificial Sequence
  primer
gtaaaacgacggccagtgccacagggtctttgtacagg

SEQ ID NO: 123440 - DNA, 38 bp, Artificial Sequence
  primer
gtaaaacgacggccagtcgtagggagagggagtgtcag

SEQ ID NO: 123441 - DNA, 19 bp, Artificial Sequence
  primer
gcgtgttctcgctgaactg

SEQ ID NO: 123442 - DNA, 38 bp, Artificial Sequence
  primer
gtaaaacgacggccagtgcaggatcctttgagcctatc

SEQ ID NO: 123443 - DNA, 38 bp, Artificial Sequence
  primer
gtaaaacgacggccagttgcgatagatgagtgtggagg

SEQ ID NO: 123444 - DNA, 21 bp, Artificial Sequence
  primer
gtaacgaagctggttccgatg

SEQ ID NO: 123445 - DNA, 21 bp, Artificial Sequence
  primer
gtgctagagctctgccaactg

SEQ ID NO: 123446 - DNA, 37 bp, Artificial Sequence
  primer
gtaaaacgacggccagtggctttcggaggaaactgag

SEQ ID NO: 123447 - DNA, 21 bp, Artificial Sequence
  primer
caaatatccggaggcatcttc

SEQ ID NO: 123448 - DNA, 21 bp, Artificial Sequence
  primer
acaattcagacccaaactgcc

SEQ ID NO: 123449 - DNA, 21 bp, Artificial Sequence
  primer
catagtagccttcgagcaggg

SEQ ID NO: 123450 - DNA, 38 bp, Artificial Sequence
  primer
gtaaaacgacggccagtctgggatcggaactttctttg

SEQ ID NO: 123451 - DNA, 21 bp, Artificial Sequence
  primer
taacaccgtcatctcgtcctg

SEQ ID NO: 123452 - DNA, 38 bp, Artificial Sequence
  primer
gtaaaacgacggccagtgggaggctaagggattcgtag

SEQ ID NO: 123453 - DNA, 21 bp, Artificial Sequence
  primer
cccataaatccagttgttgcc

SEQ ID NO: 123454 - DNA, 21 bp, Artificial Sequence
  primer
cacataggcagaggctgtgag

SEQ ID NO: 123455 - DNA, 38 bp, Artificial Sequence
  primer
gtaaaacgacggccagtagagctggatttcctggagtg

SEQ ID NO: 123456 - DNA, 38 bp, Artificial Sequence
  primer
gtaaaacgacggccagtgctcctagcaatcctgagagg

SEQ ID NO: 123457 - DNA, 21 bp, Artificial Sequence
  primer
aaagatcaaactgcctttggg

SEQ ID NO: 123458 - DNA, 21 bp, Artificial Sequence
  primer
cagtccacatgttaccaaggc

SEQ ID NO: 123459 - DNA, 38 bp, Artificial Sequence
  primer
gtaaaacgacggccagttcacaaggatgaggagactcg

SEQ ID NO: 123460 - DNA, 39 bp, Artificial Sequence
  primer
gtaaaacgacggccagtaaatggagctccttgcactatg

SEQ ID NO: 123461 - DNA, 21 bp, Artificial Sequence
  primer
agagacgggatacagagtggg

SEQ ID NO: 123462 - DNA, 37 bp, Artificial Sequence
  primer
gtaaaacgacggccagtaggtagcgatccaggctgac

SEQ ID NO: 123463 - DNA, 18 bp, Artificial Sequence
  primer
ggcaggaaacagcccaac

SEQ ID NO: 123464 - DNA, 21 bp, Artificial Sequence
  primer
tgtgtcactggagcaaagagg

SEQ ID NO: 123465 - DNA, 38 bp, Artificial Sequence
  primer
gtaaaacgacggccagtgacctccgctagtgacagttg

SEQ ID NO: 123466 - DNA, 21 bp, Artificial Sequence
  primer
gacggactcggttcattcaag

SEQ ID NO: 123467 - DNA, 21 bp, Artificial Sequence
  primer
ccaagaatcccttcttcttcg

SEQ ID NO: 123468 - DNA, 22 bp, Artificial Sequence
  primer
cctaaaggcacaagatcacgag

SEQ ID NO: 123469 - DNA, 21 bp, Artificial Sequence
  primer
gagtcacaggtaggaccaggc

SEQ ID NO: 123470 - DNA, 21 bp, Artificial Sequence
  primer
caaggaagtatatcccagccc

SEQ ID NO: 123471 - DNA, 22 bp, Artificial Sequence
  primer
tcatttgcgtttccatgtattc

SEQ ID NO: 123472 - DNA, 21 bp, Artificial Sequence
  primer
gggtgctttctaaaccctcag

SEQ ID NO: 123473 - DNA, 38 bp, Artificial Sequence
  primer
gtaaaacgacggccagttagatgcatgtgaatgccaaa

SEQ ID NO: 123474 - DNA, 21 bp, Artificial Sequence
  primer
accagttgcaagagatttccc

SEQ ID NO: 123475 - DNA, 20 bp, Artificial Sequence
  primer
gatgctcccaagctttgtcc

SEQ ID NO: 123476 - DNA, 21 bp, Artificial Sequence
  primer
caaggctgcacatttcttctc

SEQ ID NO: 123477 - DNA, 38 bp, Artificial Sequence
  primer
gtaaaacgacggccagtgaggaaagtttgtctgcggtg

SEQ ID NO: 123478 - DNA, 23 bp, Artificial Sequence
  primer
ggctgaatttctttggtgatttg

SEQ ID NO: 123479 - DNA, 44 bp, Artificial Sequence
  primer
gtaaaacgacggccagtttctatcccaattacatagactccttg

SEQ ID NO: 123480 - DNA, 38 bp, Artificial Sequence
  primer
gtaaaacgacggccagtcctgaagtgagaagggtttgg

SEQ ID NO: 123481 - DNA, 38 bp, Artificial Sequence
  primer
gtaaaacgacggccagtgttctcttgaaggaaatgccc

SEQ ID NO: 123482 - DNA, 21 bp, Artificial Sequence
  primer
actggaagtgaggattggagg

SEQ ID NO: 123483 - DNA, 21 bp, Artificial Sequence
  primer
gagcactggtagcctggagag

SEQ ID NO: 123484 - DNA, 38 bp, Artificial Sequence
  primer
gtaaaacgacggccagtacgaattcagtgccattctcc

SEQ ID NO: 123485 - DNA, 38 bp, Artificial Sequence
  primer
gtaaaacgacggccagtaatatgggctggaatgctctg

SEQ ID NO: 123486 - DNA, 21 bp, Artificial Sequence
  primer
ttggcttaggtgtctcccaac

SEQ ID NO: 123487 - DNA, 21 bp, Artificial Sequence
  primer
cctttctcagaagccaaatgc

SEQ ID NO: 123488 - DNA, 21 bp, Artificial Sequence
  primer
tggatttatgaagcaccaacg

SEQ ID NO: 123489 - DNA, 21 bp, Artificial Sequence
  primer
aaagacctggaggacagcttg

SEQ ID NO: 123490 - DNA, 21 bp, Artificial Sequence
  primer
ggagaaagggttgtatggctg

SEQ ID NO: 123491 - DNA, 23 bp, Artificial Sequence
  primer
agagtcatatggctgagttctgg

SEQ ID NO: 123492 - DNA, 38 bp, Artificial Sequence
  primer
gtaaaacgacggccagtctgatcaaggtctggaggagg

SEQ ID NO: 123493 - DNA, 38 bp, Artificial Sequence
  primer
gtaaaacgacggccagttggacctcttcctttggaatg

SEQ ID NO: 123494 - DNA, 42 bp, Artificial Sequence
  primer
gtaaaacgacggccagttgtacaaattctgaataatcccagg

SEQ ID NO: 123495 - DNA, 39 bp, Artificial Sequence
  primer
gtaaaacgacggccagtgcaatcttggaattgacaaagg

SEQ ID NO: 123496 - DNA, 21 bp, Artificial Sequence
  primer
acctgcacctttacaaccctc

SEQ ID NO: 123497 - DNA, 21 bp, Artificial Sequence
  primer
accacacccttatgcattcct

SEQ ID NO: 123498 - DNA, 21 bp, Artificial Sequence
  primer
ttacatcagccctctggaatg

SEQ ID NO: 123499 - DNA, 38 bp, Artificial Sequence
  primer
gtaaaacgacggccagtgctctatgccagaaccctgtg

SEQ ID NO: 123500 - DNA, 24 bp, Artificial Sequence
  primer
ttatggctacaaattatgcctttg

SEQ ID NO: 123501 - DNA, 39 bp, Artificial Sequence
  primer
gtaaaacgacggccagtccaaatggagctgcttcactac

SEQ ID NO: 123502 - DNA, 41 bp, Artificial Sequence
  primer
gtaaaacgacggccagtaacattgcaagaacaataacaagg

SEQ ID NO: 123503 - DNA, 22 bp, Artificial Sequence
  primer
tgacccttagaaagccattcac

SEQ ID NO: 123504 - DNA, 23 bp, Artificial Sequence
  primer
tttcctaggagcctaagtcactg

SEQ ID NO: 123505 - DNA, 37 bp, Artificial Sequence
  primer
gtaaaacgacggccagttcccagatcctccatgtttg

SEQ ID NO: 123506 - DNA, 38 bp, Artificial Sequence
  primer
gtaaaacgacggccagtggagtttgtctgagaccaggc

SEQ ID NO: 123507 - DNA, 43 bp, Artificial Sequence
  primer
gtaaaacgacggccagtttcaaattaatgcagaagtaatagcc

SEQ ID NO: 123508 - DNA, 19 bp, Artificial Sequence
  primer
aaataatcccgccaaagcc

SEQ ID NO: 123509 - DNA, 19 bp, Artificial Sequence
  primer
ctggagcggtcacttcctc

SEQ ID NO: 123510 - DNA, 35 bp, Artificial Sequence
  primer
gtaaaacgacggccagtcagccaaagagacgcagg

SEQ ID NO: 123511 - DNA, 38 bp, Artificial Sequence
  primer
gtaaaacgacggccagttaggactggagctggtccttg

SEQ ID NO: 123512 - DNA, 21 bp, Artificial Sequence
  primer
tggaagggatttcaaggtcac

SEQ ID NO: 123513 - DNA, 38 bp, Artificial Sequence
  primer
gtaaaacgacggccagttagatgtgaagccactcccac

SEQ ID NO: 123514 - DNA, 21 bp, Artificial Sequence
  primer
gtgctaggtgtgctgacttgg

SEQ ID NO: 123515 - DNA, 38 bp, Artificial Sequence
  primer
gtaaaacgacggccagtccctgagacacttgagagctg

SEQ ID NO: 123516 - DNA, 21 bp, Artificial Sequence
  primer
atgtactgggagaccctggtg

SEQ ID NO: 123517 - DNA, 22 bp, Artificial Sequence
  primer
tccatgtcctcagagtctctcc

SEQ ID NO: 123518 - DNA, 37 bp, Artificial Sequence
  primer
gtaaaacgacggccagttgtctgcaccttcctccaag

SEQ ID NO: 123519 - DNA, 24 bp, Artificial Sequence
  primer
gcagttagggaaacattctctttg

SEQ ID NO: 123520 - DNA, 20 bp, Artificial Sequence
  primer
acgccaccattacaaagcac

SEQ ID NO: 123521 - DNA, 22 bp, Artificial Sequence
  primer
cctctttcaggtgaaggaacac

SEQ ID NO: 123522 - DNA, 39 bp, Artificial Sequence
  primer
gtaaaacgacggccagtcccatctccttcattcctgaac

SEQ ID NO: 123523 - DNA, 37 bp, Artificial Sequence
  primer
gtaaaacgacggccagtatgccgagctgtttgtgaac

SEQ ID NO: 123524 - DNA, 24 bp, Artificial Sequence
  primer
aactttacactggaagctggaaac

SEQ ID NO: 123525 - DNA, 21 bp, Artificial Sequence
  primer
gcttcaggatttgttggtttg

SEQ ID NO: 123526 - DNA, 38 bp, Artificial Sequence
  primer
gtaaaacgacggccagttcatgtccattggagacaagg

SEQ ID NO: 123527 - DNA, 19 bp, Artificial Sequence
  primer
gccaacagctggagaaagg

SEQ ID NO: 123528 - DNA, 21 bp, Artificial Sequence
  primer
tctatggcctatccatccagc

SEQ ID NO: 123529 - DNA, 42 bp, Artificial Sequence
  primer
gtaaaacgacggccagtcattcattatctggacatcactttg

SEQ ID NO: 123530 - DNA, 21 bp, Artificial Sequence
  primer
tgacagcatgtgagctagtgg

SEQ ID NO: 123531 - DNA, 21 bp, Artificial Sequence
  primer
ggatagcccatgtggagtagg

SEQ ID NO: 123532 - DNA, 21 bp, Artificial Sequence
  primer
actctgttgctgcagttgtcc

SEQ ID NO: 123533 - DNA, 21 bp, Artificial Sequence
  primer
tcaacaaagcaggtccatgag

SEQ ID NO: 123534 - DNA, 37 bp, Artificial Sequence
  primer
gtaaaacgacggccagtatgggccatcaatgtgagtc

SEQ ID NO: 123535 - DNA, 25 bp, Artificial Sequence
  primer
gacatatgatttagcctcaaagctg

SEQ ID NO: 123536 - DNA, 21 bp, Artificial Sequence
  primer
tatccaccttgctgattctgg

SEQ ID NO: 123537 - DNA, 21 bp, Artificial Sequence
  primer
ccttgcccagagttcagagag

SEQ ID NO: 123538 - DNA, 23 bp, Artificial Sequence
  primer
ccatctctttgagtcctacgtcc

SEQ ID NO: 123539 - DNA, 41 bp, Artificial Sequence
  primer
gtaaaacgacggccagttcttcatgaaattcttagtgccag

SEQ ID NO: 123540 - DNA, 20 bp, Artificial Sequence
  primer
cttggtttgatttcccaagc

SEQ ID NO: 123541 - DNA, 19 bp, Artificial Sequence
  primer
tttggaccactgggttgag

SEQ ID NO: 123542 - DNA, 21 bp, Artificial Sequence
  primer
tgtcttggaataggaccctgg

SEQ ID NO: 123543 - DNA, 19 bp, Artificial Sequence
  primer
gggagccaacctctctttg

SEQ ID NO: 123544 - DNA, 38 bp, Artificial Sequence
  primer
gtaaaacgacggccagtgtggttatcccaagcaagagg

SEQ ID NO: 123545 - DNA, 21 bp, Artificial Sequence
  primer
gagttatttcccgttgatggc

SEQ ID NO: 123546 - DNA, 21 bp, Artificial Sequence
  primer
ctcatcccataatcccagagc

SEQ ID NO: 123547 - DNA, 38 bp, Artificial Sequence
  primer
gtaaaacgacggccagtgctccttcttgtccctgattc

SEQ ID NO: 123548 - DNA, 27 bp, Artificial Sequence
  primer
tgcatggtataatttgaatacataagg

SEQ ID NO: 123549 - DNA, 41 bp, Artificial Sequence
  primer
gtaaaacgacggccagtttaaagcttcttattgcacgtagg

SEQ ID NO: 123550 - DNA, 39 bp, Artificial Sequence
  primer
gtaaaacgacggccagttccctggatcaagtctcatttg

SEQ ID NO: 123551 - DNA, 38 bp, Artificial Sequence
  primer
gtaaaacgacggccagtcactgattgtgttcccagtgc

SEQ ID NO: 123552 - DNA, 38 bp, Artificial Sequence
  primer
gtaaaacgacggccagttcctgacacaagcaaccattc

SEQ ID NO: 123553 - DNA, 21 bp, Artificial Sequence
  primer
ggaagtggagaggaggagatg

SEQ ID NO: 123554 - DNA, 24 bp, Artificial Sequence
  primer
tgagcttgcaagaggaataagtaa

SEQ ID NO: 123555 - DNA, 23 bp, Artificial Sequence
  primer
tttggaattaagtttgtggaagc

SEQ ID NO: 123556 - DNA, 36 bp, Artificial Sequence
  primer
gtaaaacgacggccagttgtcctgataccgggaacc

SEQ ID NO: 123557 - DNA, 21 bp, Artificial Sequence
  primer
gcccataaccaaacttccttg

SEQ ID NO: 123558 - DNA, 24 bp, Artificial Sequence
  primer
ttaactcttggatctactctgccc

SEQ ID NO: 123559 - DNA, 38 bp, Artificial Sequence
  primer
gtaaaacgacggccagtcaaaggtagaaggcaagccag

SEQ ID NO: 123560 - DNA, 19 bp, Artificial Sequence
  primer
cggaagacggaggactgag

SEQ ID NO: 123561 - DNA, 22 bp, Artificial Sequence
  primer
cgtgctggctgttagactcttc

SEQ ID NO: 123562 - DNA, 23 bp, Artificial Sequence
  primer
ttgcttaccaacatactgcttcc

SEQ ID NO: 123563 - DNA, 21 bp, Artificial Sequence
  primer
atgggttagagggttggactg

SEQ ID NO: 123564 - DNA, 25 bp, Artificial Sequence
  primer
agcttcttgaactcatatcctgaaa

SEQ ID NO: 123565 - DNA, 23 bp, Artificial Sequence
  primer
ggacacagaaagaattcaggttg

SEQ ID NO: 123566 - DNA, 21 bp, Artificial Sequence
  primer
atagcctcagtctcccacctg

SEQ ID NO: 123567 - DNA, 38 bp, Artificial Sequence
  primer
gtaaaacgacggccagtatgacccttctgcctttagcc

SEQ ID NO: 123568 - DNA, 38 bp, Artificial Sequence
  primer
gtaaaacgacggccagttttgcctttcattgcacactc

SEQ ID NO: 123569 - DNA, 20 bp, Artificial Sequence
  primer
gctgggcccttagaaatgac

SEQ ID NO: 123570 - DNA, 21 bp, Artificial Sequence
  primer
cctgctagagggcaagtgaac

SEQ ID NO: 123571 - DNA, 21 bp, Artificial Sequence
  primer
gtggacacctgcttctccttc

SEQ ID NO: 123572 - DNA, 21 bp, Artificial Sequence
  primer
ctccctccctgacagctttac

SEQ ID NO: 123573 - DNA, 38 bp, Artificial Sequence
  primer
gtaaaacgacggccagtttctgctgatgtgttgttggg

SEQ ID NO: 123574 - DNA, 21 bp, Artificial Sequence
  primer
agtcacatcaaacgtcccgtc

SEQ ID NO: 123575 - DNA, 21 bp, Artificial Sequence
  primer
caggagctcgatggtagttgg

SEQ ID NO: 123576 - DNA, 38 bp, Artificial Sequence
  primer
gtaaaacgacggccagtagtggatgtgaccctcctacc

SEQ ID NO: 123577 - DNA, 21 bp, Artificial Sequence
  primer
tagggcaaggagagattctgg

SEQ ID NO: 123578 - DNA, 20 bp, Artificial Sequence
  primer
cagcaggactaactccaggc

SEQ ID NO: 123579 - DNA, 38 bp, Artificial Sequence
  primer
gtaaaacgacggccagtgaaggcctctggacctgatac

SEQ ID NO: 123580 - DNA, 22 bp, Artificial Sequence
  primer
gggttactgcagtcatagctgg

SEQ ID NO: 123581 - DNA, 21 bp, Artificial Sequence
  primer
actgtaatgcttcctcccagc

SEQ ID NO: 123582 - DNA, 22 bp, Artificial Sequence
  primer
cagagaggtgagggaggtaagc

SEQ ID NO: 123583 - DNA, 37 bp, Artificial Sequence
  primer
gtaaaacgacggccagtacggttctcaggagacaggg

SEQ ID NO: 123584 - DNA, 20 bp, Artificial Sequence
  primer
aacatcgtcagagtgccagg

SEQ ID NO: 123585 - DNA, 21 bp, Artificial Sequence
  primer
agagtgctcaggcctttgttg

SEQ ID NO: 123586 - DNA, 21 bp, Artificial Sequence
  primer
ggactggagagaagaggaggc

SEQ ID NO: 123587 - DNA, 21 bp, Artificial Sequence
  primer
agaactggaccttgccaagac

SEQ ID NO: 123588 - DNA, 21 bp, Artificial Sequence
  primer
agtaagggtcagagagctggg

SEQ ID NO: 123589 - DNA, 38 bp, Artificial Sequence
  primer
gtaaaacgacggccagttcttcttccatttcctcgcag

SEQ ID NO: 123590 - DNA, 21 bp, Artificial Sequence
  primer
agagagaggccacaacgtagg

SEQ ID NO: 123591 - DNA, 20 bp, Artificial Sequence
  primer
acatttccttgctgtggcag

SEQ ID NO: 123592 - DNA, 21 bp, Artificial Sequence
  primer
tggaccctaaatagccactgc

SEQ ID NO: 123593 - DNA, 38 bp, Artificial Sequence
  primer
gtaaaacgacggccagtaggtttgagccttgaggaatg

SEQ ID NO: 123594 - DNA, 38 bp, Artificial Sequence
  primer
gtaaaacgacggccagtgctggcagatactgaccacag

SEQ ID NO: 123595 - DNA, 21 bp, Artificial Sequence
  primer
atggtgagcaatagcaccatc

SEQ ID NO: 123596 - DNA, 23 bp, Artificial Sequence
  primer
tgtgtttcagagaacagcactca

SEQ ID NO: 123597 - DNA, 24 bp, Artificial Sequence
  primer
aaaccatccaatgaaatagagcag

SEQ ID NO: 123598 - DNA, 38 bp, Artificial Sequence
  primer
gtaaaacgacggccagtaagatctggctcagcagtgac

SEQ ID NO: 123599 - DNA, 38 bp, Artificial Sequence
  primer
gtaaaacgacggccagtgctttggcatgaatggaaata

SEQ ID NO: 123600 - DNA, 39 bp, Artificial Sequence
  primer
gtaaaacgacggccagtctctaaccagatttggaccacc

SEQ ID NO: 123601 - DNA, 20 bp, Artificial Sequence
  primer
agggagccaagactaccagc

SEQ ID NO: 123602 - DNA, 21 bp, Artificial Sequence
  primer
gataccaccctgacccacaac

SEQ ID NO: 123603 - DNA, 38 bp, Artificial Sequence
  primer
gtaaaacgacggccagtcacatacaccatgggaactgg

SEQ ID NO: 123604 - DNA, 20 bp, Artificial Sequence
  primer
cacttgctatgtgtgcagcc

SEQ ID NO: 123605 - DNA, 37 bp, Artificial Sequence
  primer
gtaaaacgacggccagtggagttcagggatctttggc

SEQ ID NO: 123606 - DNA, 36 bp, Artificial Sequence
  primer
gtaaaacgacggccagttgaagggcaaatgccagag

SEQ ID NO: 123607 - DNA, 26 bp, Artificial Sequence
  primer
gcacaatgaatacatcattacatcac

SEQ ID NO: 123608 - DNA, 35 bp, Artificial Sequence
  primer
gtaaaacgacggccagtgaatctggcacgctgacg

SEQ ID NO: 123609 - DNA, 23 bp, Artificial Sequence
  primer
tttgtttcaccttctcctttctg

SEQ ID NO: 123610 - DNA, 21 bp, Artificial Sequence
  primer
ccagccaaatcctctcctatg

SEQ ID NO: 123611 - DNA, 23 bp, Artificial Sequence
  primer
ccaacacactttgaaatagctgc

SEQ ID NO: 123612 - DNA, 38 bp, Artificial Sequence
  primer
gtaaaacgacggccagtctactttagggttcctggccc

SEQ ID NO: 123613 - DNA, 21 bp, Artificial Sequence
  primer
tggagaaagaagcctcagctc

SEQ ID NO: 123614 - DNA, 21 bp, Artificial Sequence
  primer
caagggaagtgctggtaaagc

SEQ ID NO: 123615 - DNA, 21 bp, Artificial Sequence
  primer
tgaatcccacatggatctcag

SEQ ID NO: 123616 - DNA, 21 bp, Artificial Sequence
  primer
gggtaagaaggcaagcaagtg

SEQ ID NO: 123617 - DNA, 25 bp, Artificial Sequence
  primer
ttctccttggattgaaatactgaaa

SEQ ID NO: 123618 - DNA, 24 bp, Artificial Sequence
  primer
gaagaagaaggaaggaggtgagag

SEQ ID NO: 123619 - DNA, 36 bp, Artificial Sequence
  primer
gtaaaacgacggccagtaattgggcaagttgcttgg

SEQ ID NO: 123620 - DNA, 38 bp, Artificial Sequence
  primer
gtaaaacgacggccagtcacacagccagctccctaaag

SEQ ID NO: 123621 - DNA, 21 bp, Artificial Sequence
  primer
ggtccaaatctgtcttcaggc

SEQ ID NO: 123622 - DNA, 21 bp, Artificial Sequence
  primer
cttcagataaagcccgtgtgg

SEQ ID NO: 123623 - DNA, 21 bp, Artificial Sequence
  primer
aaactggaccttggaaaccag

SEQ ID NO: 123624 - DNA, 40 bp, Artificial Sequence
  primer
gtaaaacgacggccagtaaggtataaaggcacgtcaatcc

SEQ ID NO: 123625 - DNA, 22 bp, Artificial Sequence
  primer
gcatgataagaggcaattccag

SEQ ID NO: 123626 - DNA, 38 bp, Artificial Sequence
  primer
gtaaaacgacggccagtgaggaatacgctccaggtcac

SEQ ID NO: 123627 - DNA, 21 bp, Artificial Sequence
  primer
ttgttgcataggaagaggtgg

SEQ ID NO: 123628 - DNA, 21 bp, Artificial Sequence
  primer
acagtcacccagttcaggagg

SEQ ID NO: 123629 - DNA, 18 bp, Artificial Sequence
  primer
aatcaaacccggcaaagg

SEQ ID NO: 123630 - DNA, 38 bp, Artificial Sequence
  primer
gtaaaacgacggccagtgctaccttcctggagagaacc

SEQ ID NO: 123631 - DNA, 38 bp, Artificial Sequence
  primer
gtaaaacgacggccagtcggagtgcgtaactctgtctc

SEQ ID NO: 123632 - DNA, 21 bp, Artificial Sequence
  primer
aagcagggacctcaagactcc

SEQ ID NO: 123633 - DNA, 21 bp, Artificial Sequence
  primer
ctcttggccttcctcaaacac

SEQ ID NO: 123634 - DNA, 21 bp, Artificial Sequence
  primer
agggatgcatgttgatgtctg

SEQ ID NO: 123635 - DNA, 38 bp, Artificial Sequence
  primer
gtaaaacgacggccagtcagtgtcttgcccacactgac

SEQ ID NO: 123636 - DNA, 38 bp, Artificial Sequence
  primer
gtaaaacgacggccagttgctgtcatgcagggagtaac

SEQ ID NO: 123637 - DNA, 38 bp, Artificial Sequence
  primer
gtaaaacgacggccagtgctgcctgctaagctcaaatc

SEQ ID NO: 123638 - DNA, 21 bp, Artificial Sequence
  primer
cctcagataactgctccagcc

SEQ ID NO: 123639 - DNA, 38 bp, Artificial Sequence
  primer
gtaaaacgacggccagtgtcactcccttcacatggttg

SEQ ID NO: 123640 - DNA, 21 bp, Artificial Sequence
  primer
ttgtggtaattgtgtcgaggc

SEQ ID NO: 123641 - DNA, 21 bp, Artificial Sequence
  primer
ctggccacaggtccaataaag

SEQ ID NO: 123642 - DNA, 21 bp, Artificial Sequence
  primer
tagtggcattgtccctcaagc

SEQ ID NO: 123643 - DNA, 36 bp, Artificial Sequence
  primer
gtaaaacgacggccagtcctacaggacgtcccaagc

SEQ ID NO: 123644 - DNA, 22 bp, Artificial Sequence
  primer
gccactagttgttgtcaaaccc

SEQ ID NO: 123645 - DNA, 21 bp, Artificial Sequence
  primer
caggtggccataatcatgttg

SEQ ID NO: 123646 - DNA, 38 bp, Artificial Sequence
  primer
gtaaaacgacggccagtgtcaccctgtagcctcagagc

SEQ ID NO: 123647 - DNA, 38 bp, Artificial Sequence
  primer
gtaaaacgacggccagtccttagtcgtacctcgatggc

SEQ ID NO: 123648 - DNA, 38 bp, Artificial Sequence
  primer
gtaaaacgacggccagtcaggtaggagggagagacacg

SEQ ID NO: 123649 - DNA, 38 bp, Artificial Sequence
  primer
gtaaaacgacggccagtcagagggagtcctttcctgag

SEQ ID NO: 123650 - DNA, 21 bp, Artificial Sequence
  primer
gtgggaacagatccactctcc

SEQ ID NO: 123651 - DNA, 37 bp, Artificial Sequence
  primer
gtaaaacgacggccagtattcctgctgccctttcttg

SEQ ID NO: 123652 - DNA, 21 bp, Artificial Sequence
  primer
attgggcagagaccttgtcag

SEQ ID NO: 123653 - DNA, 21 bp, Artificial Sequence
  primer
ctaaccagggcttaccactgc

SEQ ID NO: 123654 - DNA, 21 bp, Artificial Sequence
  primer
agggagaaagatccaacatgg

SEQ ID NO: 123655 - DNA, 35 bp, Artificial Sequence
  primer
gtaaaacgacggccagtggtggagcgggacatcac

SEQ ID NO: 123656 - DNA, 21 bp, Artificial Sequence
  primer
cttcactttcaactgcctgcc

SEQ ID NO: 123657 - DNA, 39 bp, Artificial Sequence
  primer
gtaaaacgacggccagtcaaatatgttcacaatgcccag

SEQ ID NO: 123658 - DNA, 21 bp, Artificial Sequence
  primer
tctgggtctttgtggaagatg

SEQ ID NO: 123659 - DNA, 38 bp, Artificial Sequence
  primer
gtaaaacgacggccagtggaggtgggaaggaaagacac

SEQ ID NO: 123660 - DNA, 21 bp, Artificial Sequence
  primer
tgtacagactgcagaggctgg

SEQ ID NO: 123661 - DNA, 19 bp, Artificial Sequence
  primer
accctgtttgccttcatgg

SEQ ID NO: 123662 - DNA, 20 bp, Artificial Sequence
  primer
ctgccacgcttgtgtttatg

SEQ ID NO: 123663 - DNA, 19 bp, Artificial Sequence
  primer
ctgctttgccatctggctc

SEQ ID NO: 123664 - DNA, 21 bp, Artificial Sequence
  primer
acctgaagtgggagattccag

SEQ ID NO: 123665 - DNA, 37 bp, Artificial Sequence
  primer
gtaaaacgacggccagtgacagaaaggctcagggacc

SEQ ID NO: 123666 - DNA, 21 bp, Artificial Sequence
  primer
ccatagggctgctgaatacac

SEQ ID NO: 123667 - DNA, 38 bp, Artificial Sequence
  primer
gtaaaacgacggccagtagtccagactctcaggttcgg

SEQ ID NO: 123668 - DNA, 21 bp, Artificial Sequence
  primer
ttggagaagtcctcagacacg

SEQ ID NO: 123669 - DNA, 21 bp, Artificial Sequence
  primer
atcgggccttcctctataagc

SEQ ID NO: 123670 - DNA, 21 bp, Artificial Sequence
  primer
gagggcacagtgtgatgagag

SEQ ID NO: 123671 - DNA, 39 bp, Artificial Sequence
  primer
gtaaaacgacggccagtgattatagtgtgagcaacgccc

SEQ ID NO: 123672 - DNA, 20 bp, Artificial Sequence
  primer
gtgcctccactctccaggtc

SEQ ID NO: 123673 - DNA, 38 bp, Artificial Sequence
  primer
gtaaaacgacggccagttgggaagaagactcccttgtg

SEQ ID NO: 123674 - DNA, 43 bp, Artificial Sequence
  primer
gtaaaacgacggccagtctatggtatgctgaacccatctataa

SEQ ID NO: 123675 - DNA, 25 bp, Artificial Sequence
  primer
aaagatggtgttaccaaatatgcaa

SEQ ID NO: 123676 - DNA, 22 bp, Artificial Sequence
  primer
ttcccttcttgcactggtagtc

SEQ ID NO: 123677 - DNA, 44 bp, Artificial Sequence
  primer
gtaaaacgacggccagtgccaaatctactactgccatatgtaac

SEQ ID NO: 123678 - DNA, 41 bp, Artificial Sequence
  primer
gtaaaacgacggccagttggtaaggtcaatttcaacaagac

SEQ ID NO: 123679 - DNA, 22 bp, Artificial Sequence
  primer
caaccagaacagataagccctc

SEQ ID NO: 123680 - DNA, 38 bp, Artificial Sequence
  primer
gtaaaacgacggccagtccgtgcctggctagataattc

SEQ ID NO: 123681 - DNA, 21 bp, Artificial Sequence
  primer
accttgcatggacagtttctg

SEQ ID NO: 123682 - DNA, 42 bp, Artificial Sequence
  primer
gtaaaacgacggccagttggttctaatgaagaatgcctactc

SEQ ID NO: 123683 - DNA, 41 bp, Artificial Sequence
  primer
gtaaaacgacggccagtaaagtggcataaatggtttactgg

SEQ ID NO: 123684 - DNA, 39 bp, Artificial Sequence
  primer
gtaaaacgacggccagtaacatttaagcattgcctcagc

SEQ ID NO: 123685 - DNA, 25 bp, Artificial Sequence
  primer
aatgcaatggtagagagtttaatgc

SEQ ID NO: 123686 - DNA, 22 bp, Artificial Sequence
  primer
gaaatattgtcagcttgggtgg

SEQ ID NO: 123687 - DNA, 42 bp, Artificial Sequence
  primer
gtaaaacgacggccagtgcatcttcatcatccttatttatcg

SEQ ID NO: 123688 - DNA, 40 bp, Artificial Sequence
  primer
gtaaaacgacggccagtgggatcaaagtgataaaggttgg

SEQ ID NO: 123689 - DNA, 41 bp, Artificial Sequence
  primer
gtaaaacgacggccagtaaggaaggaaggtaggttaacagc

SEQ ID NO: 123690 - DNA, 39 bp, Artificial Sequence
  primer
gtaaaacgacggccagttttgtcttgtagttgcctgcac

SEQ ID NO: 123691 - DNA, 21 bp, Artificial Sequence
  primer
gaattgagtgagacgagcgtg

SEQ ID NO: 123692 - DNA, 38 bp, Artificial Sequence
  primer
gtaaaacgacggccagttagaaagttacgaggcgggac

SEQ ID NO: 123693 - DNA, 21 bp, Artificial Sequence
  primer
gaccttcgatggcattacctc

SEQ ID NO: 123694 - DNA, 21 bp, Artificial Sequence
  primer
tggcactgataaccacacagc

SEQ ID NO: 123695 - DNA, 21 bp, Artificial Sequence
  primer
cagtgatgaggagcgggtaac

SEQ ID NO: 123696 - DNA, 39 bp, Artificial Sequence
  primer
gtaaaacgacggccagtgctcctgagacaaatatgctgc

SEQ ID NO: 123697 - DNA, 20 bp, Artificial Sequence
  primer
aaacggtgctgtgagtgagg

SEQ ID NO: 123698 - DNA, 39 bp, Artificial Sequence
  primer
gtaaaacgacggccagtgatcaactgtccttctgatggc

SEQ ID NO: 123699 - DNA, 39 bp, Artificial Sequence
  primer
gtaaaacgacggccagtttcagcttctatgaaattgccc

SEQ ID NO: 123700 - DNA, 21 bp, Artificial Sequence
  primer
agagcttccctcctgatggtc

SEQ ID NO: 123701 - DNA, 21 bp, Artificial Sequence
  primer
ccagttaggttcccagtgagc

SEQ ID NO: 123702 - DNA, 21 bp, Artificial Sequence
  primer
tcactggccacatttatgcag

SEQ ID NO: 123703 - DNA, 20 bp, Artificial Sequence
  primer
cgggcctgaaatctcttctc

SEQ ID NO: 123704 - DNA, 20 bp, Artificial Sequence
  primer
gcgtgagaacagatggcttc

SEQ ID NO: 123705 - DNA, 38 bp, Artificial Sequence
  primer
gtaaaacgacggccagtttatttgtcactgaatggcgg

SEQ ID NO: 123706 - DNA, 20 bp, Artificial Sequence
  primer
gtgcaggttgcgagtgtacg

SEQ ID NO: 123707 - DNA, 38 bp, Artificial Sequence
  primer
gtaaaacgacggccagtatcatggaggatgtctcaccc

SEQ ID NO: 123708 - DNA, 38 bp, Artificial Sequence
  primer
gtaaaacgacggccagtaatagccgttgcttgctcttg

SEQ ID NO: 123709 - DNA, 38 bp, Artificial Sequence
  primer
gtaaaacgacggccagtgtccggccaataaatggtttc

SEQ ID NO: 123710 - DNA, 21 bp, Artificial Sequence
  primer
ctacctgctggtgctgtttcc

SEQ ID NO: 123711 - DNA, 39 bp, Artificial Sequence
  primer
gtaaaacgacggccagttgtagagtttctgctgaatgcg

SEQ ID NO: 123712 - DNA, 21 bp, Artificial Sequence
  primer
cccatgttagtagccagagcc

SEQ ID NO: 123713 - DNA, 21 bp, Artificial Sequence
  primer
gtacctgaacccatgctcctc

SEQ ID NO: 123714 - DNA, 38 bp, Artificial Sequence
  primer
gtaaaacgacggccagtcaaacctggatcaaagcagaa

SEQ ID NO: 123715 - DNA, 39 bp, Artificial Sequence
  primer
gtaaaacgacggccagtcccttccgtcagacacacatac

SEQ ID NO: 123716 - DNA, 38 bp, Artificial Sequence
  primer
gtaaaacgacggccagtcaaacagcagaagcaaagctg

SEQ ID NO: 123717 - DNA, 28 bp, Artificial Sequence
  primer
ttccatgaattctataactatgtttgct

SEQ ID NO: 123718 - DNA, 24 bp, Artificial Sequence
  primer
aaatacacctgcacttacactccc

SEQ ID NO: 123719 - DNA, 22 bp, Artificial Sequence
  primer
tgccagctaagaacatgagttg

SEQ ID NO: 123720 - DNA, 21 bp, Artificial Sequence
  primer
ttcctgacccttggaatgtta

SEQ ID NO: 123721 - DNA, 37 bp, Artificial Sequence
  primer
gtaaaacgacggccagtctcggtccattccttgacac

SEQ ID NO: 123722 - DNA, 40 bp, Artificial Sequence
  primer
gtaaaacgacggccagtcacagcttcatacaaccacacag

SEQ ID NO: 123723 - DNA, 38 bp, Artificial Sequence
  primer
gtaaaacgacggccagtggcactggagtgacacctaag

SEQ ID NO: 123724 - DNA, 37 bp, Artificial Sequence
  primer
gtaaaacgacggccagtagcaggagtctgatcatggg

SEQ ID NO: 123725 - DNA, 37 bp, Artificial Sequence
  primer
gtaaaacgacggccagtctctgaagccgacagaatgg

SEQ ID NO: 123726 - DNA, 38 bp, Artificial Sequence
  primer
gtaaaacgacggccagtatagaggcccagagagggatg

SEQ ID NO: 123727 - DNA, 21 bp, Artificial Sequence
  primer
tgtgtttgtggaagaagtggg

SEQ ID NO: 123728 - DNA, 21 bp, Artificial Sequence
  primer
ctactgtttgggaggagccac

SEQ ID NO: 123729 - DNA, 38 bp, Artificial Sequence
  primer
gtaaaacgacggccagtatacagcaggccacagtcttg

SEQ ID NO: 123730 - DNA, 22 bp, Artificial Sequence
  primer
cctccttgtttgcttacactgc

SEQ ID NO: 123731 - DNA, 20 bp, Artificial Sequence
  primer
aaacaaacaaacgcagcacc

SEQ ID NO: 123732 - DNA, 39 bp, Artificial Sequence
  primer
gtaaaacgacggccagtttatatctggtctcgcaggagc

SEQ ID NO: 123733 - DNA, 38 bp, Artificial Sequence
  primer
gtaaaacgacggccagtgagtcatcgtcgtcctcttcc

SEQ ID NO: 123734 - DNA, 20 bp, Artificial Sequence
  primer
aacaatgcgcctctttcctc

SEQ ID NO: 123735 - DNA, 21 bp, Artificial Sequence
  primer
gtctcacagcaaagcaaatcc

SEQ ID NO: 123736 - DNA, 39 bp, Artificial Sequence
  primer
gtaaaacgacggccagttctgctacatcaatcacgaagg

SEQ ID NO: 123737 - DNA, 39 bp, Artificial Sequence
  primer
gtaaaacgacggccagtaagcaatgcacgactgtacttg

SEQ ID NO: 123738 - DNA, 44 bp, Artificial Sequence
  primer
gtaaaacgacggccagtgaaatattaaattaggtagctgcttgc

SEQ ID NO: 123739 - DNA, 21 bp, Artificial Sequence
  primer
aagcaagcagcatgaatgaac

SEQ ID NO: 123740 - DNA, 22 bp, Artificial Sequence
  primer
aaaccacacacacacacacaaa

SEQ ID NO: 123741 - DNA, 44 bp, Artificial Sequence
  primer
gtaaaacgacggccagtcagtcttgttaactactacagtttcgg

SEQ ID NO: 123742 - DNA, 22 bp, Artificial Sequence
  primer
cctttacctatgtgatgcccag

SEQ ID NO: 123743 - DNA, 38 bp, Artificial Sequence
  primer
gtaaaacgacggccagtactttggcctccatctgattc

SEQ ID NO: 123744 - DNA, 20 bp, Artificial Sequence
  primer
ggcaacagtgcaagactctg

SEQ ID NO: 123745 - DNA, 39 bp, Artificial Sequence
  primer
gtaaaacgacggccagtgctgtagtgagccaagattgtg

SEQ ID NO: 123746 - DNA, 25 bp, Artificial Sequence
  primer
gacatcaaattcctgtgaataaagg

SEQ ID NO: 123747 - DNA, 38 bp, Artificial Sequence
  primer
gtaaaacgacggccagtcaacgcagtacctttcctgtg

SEQ ID NO: 123748 - DNA, 21 bp, Artificial Sequence
  primer
tactgggttcctggcctctac

SEQ ID NO: 123749 - DNA, 38 bp, Artificial Sequence
  primer
gtaaaacgacggccagtccattgctcttgacagaggtg

SEQ ID NO: 123750 - DNA, 22 bp, Artificial Sequence
  primer
cacagtttccagtggactcacc

SEQ ID NO: 123751 - DNA, 38 bp, Artificial Sequence
  primer
gtaaaacgacggccagtcagggtctcaaggctatctcg

SEQ ID NO: 123752 - DNA, 38 bp, Artificial Sequence
  primer
gtaaaacgacggccagttttctggacaagatgctgagg

SEQ ID NO: 123753 - DNA, 38 bp, Artificial Sequence
  primer
gtaaaacgacggccagtgatgtaaccagtgtgcctccc

SEQ ID NO: 123754 - DNA, 38 bp, Artificial Sequence
  primer
gtaaaacgacggccagtaggatggcagagctgtacctg

SEQ ID NO: 123755 - DNA, 21 bp, Artificial Sequence
  primer
tacctccaagtgatgccaaag

SEQ ID NO: 123756 - DNA, 41 bp, Artificial Sequence
  primer
gtaaaacgacggccagtcctgtttccattactatctttggc

SEQ ID NO: 123757 - DNA, 38 bp, Artificial Sequence; identical to SEQ ID NO: 18221
  primer

SEQ ID NO: 123758 - DNA, 21 bp, Artificial Sequence
  primer
aggcatcgatgtgtgtctacc

SEQ ID NO: 123759 - DNA, 19 bp, Artificial Sequence
  primer
gaggatcactcgagcctgg

SEQ ID NO: 123760 - DNA, 38 bp, Artificial Sequence
  primer
gtaaaacgacggccagtatgttgtcaagtgggaccagc

SEQ ID NO: 123761 - DNA, 20 bp, Artificial Sequence
  primer
agcttgtttgctcaactggc

SEQ ID NO: 123762 - DNA, 37 bp, Artificial Sequence
  primer
gtaaaacgacggccagtggcaaaggaaactgagttgg

SEQ ID NO: 123763 - DNA, 21 bp, Artificial Sequence
  primer
tgccaaatgcagagaattacg

SEQ ID NO: 123764 - DNA, 21 bp, Artificial Sequence
  primer
actccaggaagcaaccatttc

SEQ ID NO: 123765 - DNA, 39 bp, Artificial Sequence
  primer
gtaaaacgacggccagtaaatactggttctcctgttggc

SEQ ID NO: 123766 - DNA, 38 bp, Artificial Sequence
  primer
gtaaaacgacggccagttttgaggctgagactgtgctg

SEQ ID NO: 123767 - DNA, 38 bp, Artificial Sequence
  primer
gtaaaacgacggccagtctgaggcacagcaatgacttg

SEQ ID NO: 123768 - DNA, 19 bp, Artificial Sequence
  primer
caagacacacacgctgcac

SEQ ID NO: 123769 - DNA, 38 bp, Artificial Sequence
  primer
gtaaaacgacggccagtgcaagaccatggatgaaacat

SEQ ID NO: 123770 - DNA, 42 bp, Artificial Sequence
  primer
gtaaaacgacggccagtaacttgaaatcctagaaatgcttcc

SEQ ID NO: 123771 - DNA, 21 bp, Artificial Sequence
  primer
accctccaaagtgaccatacc

SEQ ID NO: 123772 - DNA, 39 bp, Artificial Sequence
  primer
gtaaaacgacggccagttgcactggttgaatcgttagac

SEQ ID NO: 123773 - DNA, 21 bp, Artificial Sequence
  primer
ttctcgcttctgccacaatag

SEQ ID NO: 123774 - DNA, 38 bp, Artificial Sequence; identical to SEQ ID NO: 123766
  primer

SEQ ID NO: 123775 - DNA, 38 bp, Artificial Sequence
  primer
gtaaaacgacggccagtaacctggacttgttgttgcag

SEQ ID NO: 123776 - DNA, 21 bp, Artificial Sequence
  primer
agaagcttggagggtgtgttc

SEQ ID NO: 123777 - DNA, 40 bp, Artificial Sequence
  primer
gtaaaacgacggccagtcgaagtgttccacaccacagtag

SEQ ID NO: 123778 - DNA, 21 bp, Artificial Sequence
  primer
ggaacagaaagaggacccacc

SEQ ID NO: 123779 - DNA, 38 bp, Artificial Sequence
  primer
gtaaaacgacggccagtggaatgacgtgaagggtaagg

SEQ ID NO: 123780 - DNA, 21 bp, Artificial Sequence
  primer
agctgagaagaacccatttgc

SEQ ID NO: 123781 - DNA, 38 bp, Artificial Sequence
  primer
gtaaaacgacggccagttaaacaaagccagccagtgac

SEQ ID NO: 123782 - DNA, 38 bp, Artificial Sequence
  primer
gtaaaacgacggccagtctctagcagggaggctgaatc

SEQ ID NO: 123783 - DNA, 21 bp, Artificial Sequence
  primer
aacacctttggaccatgaagg

SEQ ID NO: 123784 - DNA, 38 bp, Artificial Sequence
  primer
gtaaaacgacggccagttcagtctcccagggaagaaac

SEQ ID NO: 123785 - DNA, 39 bp, Artificial Sequence
  primer
gtaaaacgacggccagtgtcaaatacccacacaattccc

SEQ ID NO: 123786 - DNA, 38 bp, Artificial Sequence
  primer
gtaaaacgacggccagttctgcaatctgacatcgttcc

SEQ ID NO: 123787 - DNA, 21 bp, Artificial Sequence
  primer
ttgtttcactgggcatctttg

SEQ ID NO: 123788 - DNA, 40 bp, Artificial Sequence
  primer
gtaaaacgacggccagttgttctgagcctctttactgctg

SEQ ID NO: 123789 - DNA, 21 bp, Artificial Sequence
  primer
aactttgcaaccatcatcctc

SEQ ID NO: 123790 - DNA, 38 bp, Artificial Sequence
  primer
gtaaaacgacggccagtagagaagaaaccagcattggc

SEQ ID NO: 123791 - DNA, 21 bp, Artificial Sequence
  primer
aaccagcatgttctttcggag

SEQ ID NO: 123792 - DNA, 43 bp, Artificial Sequence
  primer
gtaaaacgacggccagtggaagtaagactactattccctgctc

SEQ ID NO: 123793 - DNA, 38 bp, Artificial Sequence
  primer
gtaaaacgacggccagtattcatcatgttggagcttgc

SEQ ID NO: 123794 - DNA, 37 bp, Artificial Sequence
  primer
gtaaaacgacggccagtcagctggaacctcctctcac

SEQ ID NO: 123795 - DNA, 21 bp, Artificial Sequence
  primer
agcatggacagaaagggaaag

SEQ ID NO: 123796 - DNA, 21 bp, Artificial Sequence
  primer
tactaaagccctcgtgggaag

SEQ ID NO: 123797 - DNA, 39 bp, Artificial Sequence
  primer
gtaaaacgacggccagtgctgtccctgaatttctgacct

SEQ ID NO: 123798 - DNA, 21 bp, Artificial Sequence
  primer
acatcctgtccaacttggctc

SEQ ID NO: 123799 - DNA, 38 bp, Artificial Sequence
  primer
gtaaaacgacggccagtatggactgcttcctccagttc

SEQ ID NO: 123800 - DNA, 19 bp, Artificial Sequence
  primer
ctctctggccctgtgcatc

SEQ ID NO: 123801 - DNA, 21 bp, Artificial Sequence
  primer
gagccatgaaaggaaggagag

SEQ ID NO: 123802 - DNA, 20 bp, Artificial Sequence
  primer
atcaaagcagatggcaaagg

SEQ ID NO: 123803 - DNA, 37 bp, Artificial Sequence
  primer
gtaaaacgacggccagtctgtccttggagaggcagtg

SEQ ID NO: 123804 - DNA, 21 bp, Artificial Sequence
  primer
ctggtttcctgactcaaaggg

SEQ ID NO: 123805 - DNA, 38 bp, Artificial Sequence
  primer
gtaaaacgacggccagtgaaggagagaacccatgtccc

SEQ ID NO: 123806 - DNA, 38 bp, Artificial Sequence
  primer
gtaaaacgacggccagtacactggccctctttgcatac

SEQ ID NO: 123807 - DNA, 21 bp, Artificial Sequence
  primer
ctctcctgctcttcttgagcc

SEQ ID NO: 123808 - DNA, 38 bp, Artificial Sequence
  primer
gtaaaacgacggccagtagaagggcattatgcttgacc

SEQ ID NO: 123809 - DNA, 39 bp, Artificial Sequence
  primer
gtaaaacgacggccagtaggtcagaggtacgttggtttg

SEQ ID NO: 123810 - DNA, 18 bp, Artificial Sequence
  primer
gggaagtgccgtaggacc

SEQ ID NO: 123811 - DNA, 24 bp, Artificial Sequence
  primer
cagttacctgaatttgaatctgga

SEQ ID NO: 123812 - DNA, 40 bp, Artificial Sequence
  primer
gtaaaacgacggccagtttgatggtttacctcatcacacc

SEQ ID NO: 123813 - DNA, 38 bp, Artificial Sequence
  primer
gtaaaacgacggccagtgaatggtgtcagcggtaactg

SEQ ID NO: 123814 - DNA, 19 bp, Artificial Sequence
  primer
gacggaggcacagaattgc

SEQ ID NO: 123815 - DNA, 38 bp, Artificial Sequence
  primer
gtaaaacgacggccagtatctgcaggtacagatgccag

SEQ ID NO: 123816 - DNA, 21 bp, Artificial Sequence
  primer
gtgacagcacaagaccctgtc

SEQ ID NO: 123817 - DNA, 25 bp, Artificial Sequence
  primer
aactcaagaaactctgcatttgcta

SEQ ID NO: 123818 - DNA, 21 bp, Artificial Sequence
  primer
gtacccagggatgaaccattg

SEQ ID NO: 123819 - DNA, 21 bp, Artificial Sequence
  primer
aatacgacaggtgggaagtgc

SEQ ID NO: 123820 - DNA, 21 bp, Artificial Sequence
  primer
cagcagctcctcaaactttcc

SEQ ID NO: 123821 - DNA, 38 bp, Artificial Sequence
  primer
gtaaaacgacggccagtctccaaaggccttgaagaaag

SEQ ID NO: 123822 - DNA, 26 bp, Artificial Sequence
  primer
aaggacatattgcgtaactggatatt

SEQ ID NO: 123823 - DNA, 20 bp, Artificial Sequence
  primer
attagccaggcatgatggtg

SEQ ID NO: 123824 - DNA, 24 bp, Artificial Sequence
  primer
gaacagataatccaggtctcttgc

SEQ ID NO: 123825 - DNA, 21 bp, Artificial Sequence
  primer
gtaaagtccaatccaatcgcc

SEQ ID NO: 123826 - DNA, 20 bp, Artificial Sequence
  primer
cgggtcttaaaccagccatc

SEQ ID NO: 123827 - DNA, 24 bp, Artificial Sequence
  primer
cctataatgtccttggcacatagc

SEQ ID NO: 123828 - DNA, 38 bp, Artificial Sequence
  primer
gtaaaacgacggccagttgaccaatttcaagccctctc

SEQ ID NO: 123829 - DNA, 36 bp, Artificial Sequence
  primer
gtaaaacgacggccagttgtgcgtctggttgaaatg

SEQ ID NO: 123830 - DNA, 19 bp, Artificial Sequence
  primer
gagggacagcaagcagaaa

SEQ ID NO: 123831 - DNA, 20 bp, Artificial Sequence
  primer
tgagctggctggcaacttac

SEQ ID NO: 123832 - DNA, 35 bp, Artificial Sequence
  primer
gtaaaacgacggccagtctgggattactggcgcat

SEQ ID NO: 123833 - DNA, 21 bp, Artificial Sequence
  primer
catggtgggattatgggtgac

SEQ ID NO: 123834 - DNA, 38 bp, Artificial Sequence
  primer
gtaaaacgacggccagtgaaggatgctctcctttcacc

SEQ ID NO: 123835 - DNA, 38 bp, Artificial Sequence
  primer
gtaaaacgacggccagtagatggacgtacctggagacc

SEQ ID NO: 123836 - DNA, 21 bp, Artificial Sequence
  primer
ctcgagtactttgagggcacc

SEQ ID NO: 123837 - DNA, 36 bp, Artificial Sequence
  primer
gtaaaacgacggccagtgctattgatggaggcaggg

SEQ ID NO: 123838 - DNA, 22 bp, Artificial Sequence
  primer
tgcatagactttctagttgccg

SEQ ID NO: 123839 - DNA, 38 bp, Artificial Sequence
  primer
gtaaaacgacggccagtaggactattgatggaggcagg

SEQ ID NO: 123840 - DNA, 22 bp, Artificial Sequence
  primer
cggactctacacactttgcagc

SEQ ID NO: 123841 - DNA, 38 bp, Artificial Sequence
  primer
gtaaaacgacggccagtaaggtgaagagctccagcaag

SEQ ID NO: 123842 - DNA, 22 bp, Artificial Sequence
  primer
tttccaatgttggagttgtctg

SEQ ID NO: 123843 - DNA, 38 bp, Artificial Sequence
  primer
gtaaaacgacggccagtacacagcgactaatttgggtg

SEQ ID NO: 123844 - DNA, 22 bp, Artificial Sequence
  primer
gctctaaggtctcttccagcac

SEQ ID NO: 123845 - DNA, 26 bp, Artificial Sequence
  primer
atagttatttgccttcaatagcactg

SEQ ID NO: 123846 - DNA, 39 bp, Artificial Sequence
  primer
gtaaaacgacggccagttctcaatgtcccttattggcag

SEQ ID NO: 123847 - DNA, 21 bp, Artificial Sequence
  primer
tgcatgcatagctctttcacc

SEQ ID NO: 123848 - DNA, 21 bp, Artificial Sequence
  primer
actacaacatggcctgtgtcc

SEQ ID NO: 123849 - DNA, 38 bp, Artificial Sequence
  primer
gtaaaacgacggccagttttgagttgctgaaatgctgc

SEQ ID NO: 123850 - DNA, 21 bp, Artificial Sequence
  primer
cagtgggagaggaggtgagag

SEQ ID NO: 123851 - DNA, 38 bp, Artificial Sequence
  primer
gtaaaacgacggccagtaacaaggcatcatcttcccac

SEQ ID NO: 123852 - DNA, 38 bp, Artificial Sequence
  primer
gtaaaacgacggccagtgcaagcaaacattagggaacc

SEQ ID NO: 123853 - DNA, 21 bp, Artificial Sequence
  primer
tgtgggccatggatagtaatg

SEQ ID NO: 123854 - DNA, 21 bp, Artificial Sequence
  primer
ggaatgctgtaagaagccacc

SEQ ID NO: 123855 - DNA, 21 bp, Artificial Sequence
  primer
cctcaaataacatgggctgaa

SEQ ID NO: 123856 - DNA, 21 bp, Artificial Sequence
  primer
caaacccaaggaccaggttac

SEQ ID NO: 123857 - DNA, 21 bp, Artificial Sequence
  primer
gatgccaaatggtctagaggc

SEQ ID NO: 123858 - DNA, 38 bp, Artificial Sequence
  primer
gtaaaacgacggccagtaaatatgctgaatgccatccc

SEQ ID NO: 123859 - DNA, 27 bp, Artificial Sequence
  primer
gtgctttagaggatagcctaatcatac

SEQ ID NO: 123860 - DNA, 35 bp, Artificial Sequence
  primer
gtaaaacgacggccagttataggtgtgggccaccg

SEQ ID NO: 123861 - DNA, 38 bp, Artificial Sequence
  primer
gtaaaacgacggccagtaacaaggctaacatgcccaag

SEQ ID NO: 123862 - DNA, 37 bp, Artificial Sequence
  primer
gtaaaacgacggccagtctgggctcatgcaagtgttt

SEQ ID NO: 123863 - DNA, 21 bp, Artificial Sequence
  primer
gcacctttagtccgagctacc

SEQ ID NO: 123864 - DNA, 38 bp, Artificial Sequence
  primer
gtaaaacgacggccagtcctacatatgcgggcctaaac

SEQ ID NO: 123865 - DNA, 20 bp, Artificial Sequence
  primer
gtctcacggtcttcacagcc

SEQ ID NO: 123866 - DNA, 38 bp, Artificial Sequence
  primer
gtaaaacgacggccagttcctgattgctaagagggtgg

SEQ ID NO: 123867 - DNA, 20 bp, Artificial Sequence
  primer
tcaaatcgtctgccagaacc

SEQ ID NO: 123868 - DNA, 21 bp, Artificial Sequence
  primer
gtcagaaagccttgcctcttg

SEQ ID NO: 123869 - DNA, 21 bp, Artificial Sequence
  primer
gactgctggacttgggttagg

SEQ ID NO: 123870 - DNA, 38 bp, Artificial Sequence
  primer
gtaaaacgacggccagtaactcagaagcacctcttggg

SEQ ID NO: 123871 - DNA, 19 bp, Artificial Sequence
  primer
agttgcgttaggcaggcac

SEQ ID NO: 123872 - DNA, 21 bp, Artificial Sequence
  primer
aaaggaaggacagaggctgag

SEQ ID NO: 123873 - DNA, 37 bp, Artificial Sequence
  primer
gtaaaacgacggccagtggcacaggtggaaatgaatc

SEQ ID NO: 123874 - DNA, 23 bp, Artificial Sequence
  primer
aaagtgctctgacaaattggatg

SEQ ID NO: 123875 - DNA, 40 bp, Artificial Sequence
  primer
gtaaaacgacggccagttgacaactagccttgtttgcagt

SEQ ID NO: 123876 - DNA, 22 bp, Artificial Sequence
  primer
tttcaaaggccagctctacttc

SEQ ID NO: 123877 - DNA, 21 bp, Artificial Sequence
  primer
cctgagtctaagccagtgtgg

SEQ ID NO: 123878 - DNA, 21 bp, Artificial Sequence
  primer
acttagcaaggatggcagagg

SEQ ID NO: 123879 - DNA, 38 bp, Artificial Sequence
  primer
gtaaaacgacggccagtaagctattccctgtcccttcc

SEQ ID NO: 123880 - DNA, 38 bp, Artificial Sequence
  primer
gtaaaacgacggccagtctcatctctgcgttctcccag

SEQ ID NO: 123881 - DNA, 38 bp, Artificial Sequence
  primer
gtaaaacgacggccagtctgaagacccaggaagctgag

SEQ ID NO: 123882 - DNA, 21 bp, Artificial Sequence
  primer
aactggaaacctccagctcag

SEQ ID NO: 123883 - DNA, 22 bp, Artificial Sequence
  primer
cactgtggcatgtgtattctgg

SEQ ID NO: 123884 - DNA, 21 bp, Artificial Sequence
  primer
ccgctacccagctatgtcttg

SEQ ID NO: 123885 - DNA, 22 bp, Artificial Sequence
  primer
cagtgacagaaagacaaagggc

SEQ ID NO: 123886 - DNA, 38 bp, Artificial Sequence
  primer
gtaaaacgacggccagtggaagattgtcatccagaggc

SEQ ID NO: 123887 - DNA, 38 bp, Artificial Sequence
  primer
gtaaaacgacggccagttaacacttcggatgcaccttg

SEQ ID NO: 123888 - DNA, 21 bp, Artificial Sequence
  primer
taacgtctcattcacggatgg

SEQ ID NO: 123889 - DNA, 22 bp, Artificial Sequence
  primer
gcaagtaagaaatccatttggc

SEQ ID NO: 123890 - DNA, 23 bp, Artificial Sequence
  primer
aaatttaacagaccagtggaggc

SEQ ID NO: 123891 - DNA, 38 bp, Artificial Sequence
  primer
gtaaaacgacggccagtcaggattgacctcccattgag

SEQ ID NO: 123892 - DNA, 38 bp, Artificial Sequence
  primer
gtaaaacgacggccagtctcttccattccacaattgcc

SEQ ID NO: 123893 - DNA, 38 bp, Artificial Sequence
  primer
gtaaaacgacggccagtcaagaagaggccatgaaatcc

SEQ ID NO: 123894 - DNA, 38 bp, Artificial Sequence
  primer
gtaaaacgacggccagtgagacctgcctgctatggaac

SEQ ID NO: 123895 - DNA, 20 bp, Artificial Sequence
  primer
aaagccctgagacgggtatg

SEQ ID NO: 123896 - DNA, 38 bp, Artificial Sequence
  primer
gtaaaacgacggccagtatcctagacctccaaggctcc

SEQ ID NO: 123897 - DNA, 21 bp, Artificial Sequence
  primer
tgtgttgaccttcgtgtctcc

SEQ ID NO: 123898 - DNA, 38 bp, Artificial Sequence
  primer
gtaaaacgacggccagtaaacggatcatcaactccagg

SEQ ID NO: 123899 - DNA, 21 bp, Artificial Sequence
  primer
ttactccgccatatttcatgc

SEQ ID NO: 123900 - DNA, 21 bp, Artificial Sequence
  primer
ttctttgggttgcaaagacag

SEQ ID NO: 123901 - DNA, 20 bp, Artificial Sequence
  primer
taaggtagcactgcccaagc

SEQ ID NO: 123902 - DNA, 21 bp, Artificial Sequence
  primer
agtgaatgccacctctcacag

SEQ ID NO: 123903 - DNA, 18 bp, Artificial Sequence
  primer
agcggaacgtgctggaag

SEQ ID NO: 123904 - DNA, 37 bp, Artificial Sequence
  primer
gtaaaacgacggccagtctcacaccatccatgggaac

SEQ ID NO: 123905 - DNA, 37 bp, Artificial Sequence
  primer
gtaaaacgacggccagttgcatgaggatggagtgagc

SEQ ID NO: 123906 - DNA, 38 bp, Artificial Sequence
  primer
gtaaaacgacggccagtgacagaccgaagctcaggatg

SEQ ID NO: 123907 - DNA, 37 bp, Artificial Sequence
  primer
gtaaaacgacggccagttcaggaaactcgagactggg

SEQ ID NO: 123908 - DNA, 38 bp, Artificial Sequence
  primer
gtaaaacgacggccagtctagcctgggatgctttaccc

SEQ ID NO: 123909 - DNA, 20 bp, Artificial Sequence
  primer
gggcctatacaacccttccc

SEQ ID NO: 123910 - DNA, 22 bp, Artificial Sequence
  primer
gttctgtgcttgggcagattag

SEQ ID NO: 123911 - DNA, 37 bp, Artificial Sequence
  primer
gtaaaacgacggccagtgagttcccaccttgagggtc

SEQ ID NO: 123912 - DNA, 38 bp, Artificial Sequence
  primer
gtaaaacgacggccagttcccatccagttcatcttgtg

SEQ ID NO: 123913 - DNA, 38 bp, Artificial Sequence
  primer
gtaaaacgacggccagtagccaagctagcaacaagtcc

SEQ ID NO: 123914 - DNA, 38 bp, Artificial Sequence
  primer
gtaaaacgacggccagtaagtttgtgctcaaggtcacg

SEQ ID NO: 123915 - DNA, 21 bp, Artificial Sequence
  primer
ggaggatcaagtggttcttgc

SEQ ID NO: 123916 - DNA, 38 bp, Artificial Sequence
  primer
gtaaaacgacggccagtaaactggaagcccttcagacc

SEQ ID NO: 123917 - DNA, 38 bp, Artificial Sequence
  primer
gtaaaacgacggccagtcagcagtaacaggtgggagtg

SEQ ID NO: 123918 - DNA, 22 bp, Artificial Sequence
  primer
aaacaactttctggcctccttc

SEQ ID NO: 123919 - DNA, 38 bp, Artificial Sequence
  primer
gtaaaacgacggccagtagaccagtgggttaccaggtg

SEQ ID NO: 123920 - DNA, 21 bp, Artificial Sequence
  primer
ttcagtattcctggtgccaac

SEQ ID NO: 123921 - DNA, 37 bp, Artificial Sequence
  primer
gtaaaacgacggccagtagccagcttgctcaacaatg

SEQ ID NO: 123922 - DNA, 21 bp, Artificial Sequence
  primer
tactcccacctggagacaagc

SEQ ID NO: 123923 - DNA, 38 bp, Artificial Sequence
  primer
gtaaaacgacggccagttgcctatcaattgcattctgg

SEQ ID NO: 123924 - DNA, 21 bp, Artificial Sequence
  primer
ctgagctttgggttatctgcc

SEQ ID NO: 123925 - DNA, 21 bp, Artificial Sequence
  primer
tccatgctctgaaacttgtgg

SEQ ID NO: 123926 - DNA, 19 bp, Artificial Sequence
  primer
ggtcggagctgaagtcctg

SEQ ID NO: 123927 - DNA, 19 bp, Artificial Sequence
  primer
cactcaccagtccgggttc

SEQ ID NO: 123928 - DNA, 39 bp, Artificial Sequence
  primer
gtaaaacgacggccagtttattctggagacaaaggcagc

SEQ ID NO: 123929 - DNA, 21 bp, Artificial Sequence
  primer
ggcctcccagacctctctaac

SEQ ID NO: 123930 - DNA, 37 bp, Artificial Sequence
  primer
gtaaaacgacggccagtaacaccctgggaggagacac

SEQ ID NO: 123931 - DNA, 38 bp, Artificial Sequence
  primer
gtaaaacgacggccagtgtgtgttcctaagagggcagg

SEQ ID NO: 123932 - DNA, 38 bp, Artificial Sequence
  primer
gtaaaacgacggccagtaaagaggcgttaatcccagag

SEQ ID NO: 123933 - DNA, 38 bp, Artificial Sequence
  primer
gtaaaacgacggccagtaaatgacctctgtgaccctcc

SEQ ID NO: 123934 - DNA, 38 bp, Artificial Sequence
  primer
gtaaaacgacggccagtacttgacatgttgccttgcac

SEQ ID NO: 123935 - DNA, 20 bp, Artificial Sequence
  primer
gcatgagcatgatgtctccc

SEQ ID NO: 123936 - DNA, 38 bp, Artificial Sequence
  primer
gtaaaacgacggccagtaaggtgaatgggtggagagac

SEQ ID NO: 123937 - DNA, 22 bp, Artificial Sequence
  primer
tctaaaggagcccattaaccaa

SEQ ID NO: 123938 - DNA, 20 bp, Artificial Sequence
  primer
tcctgacctcatgatccacc

SEQ ID NO: 123939 - DNA, 37 bp, Artificial Sequence
  primer
gtaaaacgacggccagtcccactaaacaagcaaagcc

SEQ ID NO: 123940 - DNA, 38 bp, Artificial Sequence
  primer
gtaaaacgacggccagtcagcttcttgcttgacacaga

SEQ ID NO: 123941 - DNA, 21 bp, Artificial Sequence
  primer
acaacggagaatcaccaggtc

SEQ ID NO: 123942 - DNA, 38 bp, Artificial Sequence
  primer
gtaaaacgacggccagttcaatgacaggaatgctggag

SEQ ID NO: 123943 - DNA, 38 bp, Artificial Sequence
  primer
gtaaaacgacggccagtagtacttccctctgggttccg

SEQ ID NO: 123944 - DNA, 37 bp, Artificial Sequence
  primer
gtaaaacgacggccagtacaggcatgaaccaccactc

SEQ ID NO: 123945 - DNA, 21 bp, Artificial Sequence
  primer
agcctgggtgacagagaaagt

SEQ ID NO: 123946 - DNA, 38 bp, Artificial Sequence
  primer
gtaaaacgacggccagtccttgtgcctacacctgacac

SEQ ID NO: 123947 - DNA, 21 bp, Artificial Sequence
  primer
ggacacagcctgcttgtctat

SEQ ID NO: 123948 - DNA, 21 bp, Artificial Sequence
  primer
tcatttagcaggaagcagcac

SEQ ID NO: 123949 - DNA, 38 bp, Artificial Sequence
  primer
gtaaaacgacggccagtagacaaagctgtagccctggt

SEQ ID NO: 123950 - DNA, 20 bp, Artificial Sequence
  primer
atgtaccaaatgcaggccat

SEQ ID NO: 123951 - DNA, 38 bp, Artificial Sequence
  primer
gtaaaacgacggccagtcagcagaaaggaatgaccttg

SEQ ID NO: 123952 - DNA, 38 bp, Artificial Sequence
  primer
gtaaaacgacggccagttggaggcagaggattatttcc

SEQ ID NO: 123953 - DNA, 38 bp, Artificial Sequence
  primer
gtaaaacgacggccagtaaggaatgaccttgctccaac

SEQ ID NO: 123954 - DNA, 40 bp, Artificial Sequence
  primer
gtaaaacgacggccagtaaatattggcagcaaagaggatt

SEQ ID NO: 123955 - DNA, 22 bp, Artificial Sequence
  primer
cctgataatgagaatggttggg

SEQ ID NO: 123956 - DNA, 35 bp, Artificial Sequence
  primer
gtaaaacgacggccagttcctgggaatgggctgag

SEQ ID NO: 123957 - DNA, 38 bp, Artificial Sequence
  primer
gtaaaacgacggccagttacacgtcggtgtgttgtgac

SEQ ID NO: 123958 - DNA, 38 bp, Artificial Sequence
  primer
gtaaaacgacggccagtggcctggaaagactccagaac

SEQ ID NO: 123959 - DNA, 21 bp, Artificial Sequence
  primer
gcttagaaggaggaaggtggg

SEQ ID NO: 123960 - DNA, 38 bp, Artificial Sequence
  primer
gtaaaacgacggccagtctctcaccagccaccactagg

SEQ ID NO: 123961 - DNA, 38 bp, Artificial Sequence
  primer
gtaaaacgacggccagtagctttagcactaggccatcc

SEQ ID NO: 123962 - DNA, 21 bp, Artificial Sequence
  primer
tgccatttacaaagagcatgg

SEQ ID NO: 123963 - DNA, 39 bp, Artificial Sequence
  primer
gtaaaacgacggccagtcccttctgatatggatgtgagc

SEQ ID NO: 123964 - DNA, 21 bp, Artificial Sequence
  primer
aaggcacagaggaagcatttg

SEQ ID NO: 123965 - DNA, 38 bp, Artificial Sequence
  primer
gtaaaacgacggccagtccatcgtagatctcagggcag

SEQ ID NO: 123966 - DNA, 37 bp, Artificial Sequence
  primer
gtaaaacgacggccagtagcctcagttgggaagatgc

SEQ ID NO: 123967 - DNA, 20 bp, Artificial Sequence
  primer
ctccaggtcatggttcatgg

SEQ ID NO: 123968 - DNA, 18 bp, Artificial Sequence
  primer
aggcggtttgcatttgtg

SEQ ID NO: 123969 - DNA, 38 bp, Artificial Sequence
  primer
gtaaaacgacggccagtgtactgcccagcactgaaacc

SEQ ID NO: 123970 - DNA, 21 bp, Artificial Sequence
  primer
agcgagagagaagagaatggg

SEQ ID NO: 123971 - DNA, 21 bp, Artificial Sequence
  primer
cctcagaaacaagggagacag

SEQ ID NO: 123972 - DNA, 21 bp, Artificial Sequence
  primer
gcagcaactgggagtaggaac

SEQ ID NO: 123973 - DNA, 20 bp, Artificial Sequence
  primer
cctcgatgacggagtgagac

SEQ ID NO: 123974 - DNA, 37 bp, Artificial Sequence
  primer
gtaaaacgacggccagtcagcaaagctggtttcttcg

SEQ ID NO: 123975 - DNA, 21 bp, Artificial Sequence
  primer
agaaatgtttcccaacccttg

SEQ ID NO: 123976 - DNA, 21 bp, Artificial Sequence
  primer
cagaaccagaccctgtctcag

SEQ ID NO: 123977 - DNA, 24 bp, Artificial Sequence
  primer
gctctaatcctatcatcatctggc

SEQ ID NO: 123978 - DNA, 21 bp, Artificial Sequence
  primer
gaactcaagaggcagagggtg

SEQ ID NO: 123979 - DNA, 40 bp, Artificial Sequence
  primer
gtaaaacgacggccagtttctgaaagcagaagaacattgc

SEQ ID NO: 123980 - DNA, 38 bp, Artificial Sequence
  primer
gtaaaacgacggccagtttgtttgccaaagctgaagag

SEQ ID NO: 123981 - DNA, 26 bp, Artificial Sequence
  primer
aaatgccactgagttatatactttgc

SEQ ID NO: 123982 - DNA, 21 bp, Artificial Sequence
  primer
ctacatccagtgattggtgcg

SEQ ID NO: 123983 - DNA, 38 bp, Artificial Sequence
  primer
gtaaaacgacggccagtaatcatggctgatcctgaagc

SEQ ID NO: 123984 - DNA, 38 bp, Artificial Sequence
  primer
gtaaaacgacggccagtaaatgttcctcttgccgaaac

SEQ ID NO: 123985 - DNA, 21 bp, Artificial Sequence
  primer
agatctgtcaggccatggttc

SEQ ID NO: 123986 - DNA, 21 bp, Artificial Sequence
  primer
ctgccacccatcacatctatc

SEQ ID NO: 123987 - DNA, 38 bp, Artificial Sequence
  primer
gtaaaacgacggccagtcagagcctcgtatctactgcg

SEQ ID NO: 123988 - DNA, 20 bp, Artificial Sequence
  primer
atggacgtgcgtaaagatgg

SEQ ID NO: 123989 - DNA, 38 bp, Artificial Sequence
  primer
gtaaaacgacggccagtgaaaggacctgtccagtgagg

SEQ ID NO: 123990 - DNA, 21 bp, Artificial Sequence
  primer
cttcccattgcttgacgtttg

SEQ ID NO: 123991 - DNA, 21 bp, Artificial Sequence
  primer
ttccaggagtttcgctttgtc

SEQ ID NO: 123992 - DNA, 20 bp, Artificial Sequence
  primer
cacgtacagcatcctctccc

SEQ ID NO: 123993 - DNA, 38 bp, Artificial Sequence
  primer
gtaaaacgacggccagtactcaccctgccaggtcttac

SEQ ID NO: 123994 - DNA, 21 bp, Artificial Sequence
  primer
gggtgtgtgtagccatgtttc

SEQ ID NO: 123995 - DNA, 21 bp, Artificial Sequence
  primer
gaggcggtttagacaccagac

SEQ ID NO: 123996 - DNA, 21 bp, Artificial Sequence
  primer
caaacttccaacacaatgcaa

SEQ ID NO: 123997 - DNA, 43 bp, Artificial Sequence
  primer
gtaaaacgacggccagtctttcaatagttcaaactgactgctg

SEQ ID NO: 123998 - DNA, 20 bp, Artificial Sequence
  primer
cagtcattgaagccaaaccc

SEQ ID NO: 123999 - DNA, 37 bp, Artificial Sequence
  primer
gtaaaacgacggccagtttcttcttcggtgaaatgcg

SEQ ID NO: 124000 - DNA, 38 bp, Artificial Sequence
  primer
gtaaaacgacggccagtacaaaccaaatccaacacagc

SEQ ID NO: 124001 - DNA, 39 bp, Artificial Sequence
  primer
gtaaaacgacggccagtctgagaccttcctaactgctgc

SEQ ID NO: 124002 - DNA, 39 bp, Artificial Sequence
  primer
gtaaaacgacggccagtggaaaggagaacaatgcagatg

SEQ ID NO: 124003 - DNA, 40 bp, Artificial Sequence
  primer
gtaaaacgacggccagtcgaaacatgagacccaatacttc

SEQ ID NO: 124004 - DNA, 41 bp, Artificial Sequence
  primer
gtaaaacgacggccagtttgtatttcaaatgctgtctcgtc

SEQ ID NO: 124005 - DNA, 40 bp, Artificial Sequence
  primer
gtaaaacgacggccagtaaattcctataacgattcctggg

SEQ ID NO: 124006 - DNA, 43 bp, Artificial Sequence
  primer
gtaaaacgacggccagtttcacttaagctaaattatccttcgg

SEQ ID NO: 124007 - DNA, 22 bp, Artificial Sequence
  primer
tgctacatattgccttgactgg

SEQ ID NO: 124008 - DNA, 20 bp, Artificial Sequence
  primer
gtggcagagaagccagtgac

SEQ ID NO: 124009 - DNA, 22 bp, Artificial Sequence
  primer
cccaaagtcaccaagataaacc

SEQ ID NO: 124010 - DNA, 38 bp, Artificial Sequence
  primer
gtaaaacgacggccagtagggaaatggttgaggctttc

SEQ ID NO: 124011 - DNA, 21 bp, Artificial Sequence
  primer
atcctggcagtagacacaggg

SEQ ID NO: 124012 - DNA, 22 bp, Artificial Sequence
  primer
tgctctgctcctggtttatagg

SEQ ID NO: 124013 - DNA, 21 bp, Artificial Sequence
  primer
caacaaattcatgcccaagag

SEQ ID NO: 124014 - DNA, 38 bp, Artificial Sequence
  primer
gtaaaacgacggccagtaatgcatgcgagtatcacctc

SEQ ID NO: 124015 - DNA, 21 bp, Artificial Sequence
  primer
ctgctgaattcatcctctccc

SEQ ID NO: 124016 - DNA, 38 bp, Artificial Sequence
  primer
gtaaaacgacggccagttgccttcattgtgagcagaag

SEQ ID NO: 124017 - DNA, 20 bp, Artificial Sequence
  primer
ggccaggaatgtgctctatg

SEQ ID NO: 124018 - DNA, 21 bp, Artificial Sequence
  primer
ttgaaggtaagttcccaaggc

SEQ ID NO: 124019 - DNA, 41 bp, Artificial Sequence
  primer
gtaaaacgacggccagtttgcattcctcatacacatgaatc

SEQ ID NO: 124020 - DNA, 38 bp, Artificial Sequence
  primer
gtaaaacgacggccagtggtccaaagcacaaactgttg

SEQ ID NO: 124021 - DNA, 22 bp, Artificial Sequence
  primer
ggcttcccactctcaactttac

SEQ ID NO: 124022 - DNA, 38 bp, Artificial Sequence
  primer
gtaaaacgacggccagtaacaaaccatttccgtcgaac

SEQ ID NO: 124023 - DNA, 38 bp, Artificial Sequence
  primer
gtaaaacgacggccagtggaacgagtgtttgtgcagag

SEQ ID NO: 124024 - DNA, 21 bp, Artificial Sequence
  primer
aagtcaactcccaacccagag

SEQ ID NO: 124025 - DNA, 38 bp, Artificial Sequence
  primer
gtaaaacgacggccagtccgtcatattctggcaggaag

SEQ ID NO: 124026 - DNA, 36 bp, Artificial Sequence
  primer
gtaaaacgacggccagtctgctccactctcccttgc

SEQ ID NO: 124027 - DNA, 37 bp, Artificial Sequence
  primer
gtaaaacgacggccagtgggagatcttgaatgggagg

SEQ ID NO: 124028 - DNA, 21 bp, Artificial Sequence
  primer
acaggctggtgtaggaagctg

SEQ ID NO: 124029 - DNA, 38 bp, Artificial Sequence
  primer
gtaaaacgacggccagttggtctcttcattcatcctgc

SEQ ID NO: 124030 - DNA, 21 bp, Artificial Sequence
  primer
gtgtactctcagggcacttgg

SEQ ID NO: 124031 - DNA, 21 bp, Artificial Sequence
  primer
gtgtgagcctcagcctctgtc

SEQ ID NO: 124032 - DNA, 18 bp, Artificial Sequence
  primer
gaaccctgctggaaaccc

SEQ ID NO: 124033 - DNA, 38 bp, Artificial Sequence
  primer
gtaaaacgacggccagtggacagaaaccaccactcctc

SEQ ID NO: 124034 - DNA, 21 bp, Artificial Sequence
  primer
acagcggagctttctcatttc

SEQ ID NO: 124035 - DNA, 22 bp, Artificial Sequence
  primer
tggtgttaaccctaactttggc

SEQ ID NO: 124036 - DNA, 18 bp, Artificial Sequence
  primer
ctcaggagagctgctggc

SEQ ID NO: 124037 - DNA, 21 bp, Artificial Sequence
  primer
ctttgctcctggactttctgc

SEQ ID NO: 124038 - DNA, 21 bp, Artificial Sequence
  primer
ttctgtccggatctaatgctg

SEQ ID NO: 124039 - DNA, 21 bp, Artificial Sequence
  primer
gacaagctgtttctcccaacc

SEQ ID NO: 124040 - DNA, 39 bp, Artificial Sequence
  primer
gtaaaacgacggccagtaatgtccaatttgtgatttgcc

SEQ ID NO: 124041 - DNA, 26 bp, Artificial Sequence
  primer
gagtgactcagtgctgataactgata

SEQ ID NO: 124042 - DNA, 39 bp, Artificial Sequence
  primer
gtaaaacgacggccagttgtccaatcaaatagcatcctc

SEQ ID NO: 124043 - DNA, 20 bp, Artificial Sequence
  primer
gctagcaaatgggacagtgc

SEQ ID NO: 124044 - DNA, 39 bp, Artificial Sequence
  primer
gtaaaacgacggccagtagggctttatcatcaagagcag

SEQ ID NO: 124045 - DNA, 41 bp, Artificial Sequence
  primer
gtaaaacgacggccagttgaactaacgcaaatagcatcatc

SEQ ID NO: 124046 - DNA, 27 bp, Artificial Sequence
  primer
tgtttacctggtagtttgattactttg

SEQ ID NO: 124047 - DNA, 37 bp, Artificial Sequence
  primer
gtaaaacgacggccagttttcaaatagctgggatggg

SEQ ID NO: 124048 - DNA, 36 bp, Artificial Sequence
  primer
gtaaaacgacggccagtcacacaccaagatggctgc

SEQ ID NO: 124049 - DNA, 38 bp, Artificial Sequence
  primer
gtaaaacgacggccagtaagtgtttccaagatgggcag

SEQ ID NO: 124050 - DNA, 21 bp, Artificial Sequence
  primer
cagcacagcttgtcatgtctc

SEQ ID NO: 124051 - DNA, 38 bp, Artificial Sequence
  primer
gtaaaacgacggccagtactgggaagaatcaggaagcc

SEQ ID NO: 124052 - DNA, 38 bp, Artificial Sequence
  primer
gtaaaacgacggccagttcacacacccagagtgaaagg

SEQ ID NO: 124053 - DNA, 21 bp, Artificial Sequence
  primer
gaggtaggagctgagccaatg

SEQ ID NO: 124054 - DNA, 20 bp, Artificial Sequence
  primer
gtcccttgccacatgaagag

SEQ ID NO: 124055 - DNA, 21 bp, Artificial Sequence
  primer
attggacagggagagggtttc

SEQ ID NO: 124056 - DNA, 38 bp, Artificial Sequence
  primer
gtaaaacgacggccagttgggtgactccttcctaccac

SEQ ID NO: 124057 - DNA, 38 bp, Artificial Sequence
  primer
gtaaaacgacggccagtttctgtttccgaggaggagag

SEQ ID NO: 124058 - DNA, 23 bp, Artificial Sequence
  primer
cgctgtatagtgacagttctcgg

SEQ ID NO: 124059 - DNA, 20 bp, Artificial Sequence
  primer
tgtctcacaatgggactggg

SEQ ID NO: 124060 - DNA, 20 bp, Artificial Sequence
  primer
gtgccacaagcccactctac

SEQ ID NO: 124061 - DNA, 21 bp, Artificial Sequence
  primer
aagatgttgtagcgcatccag

SEQ ID NO: 124062 - DNA, 21 bp, Artificial Sequence
  primer
ccatttaaccctctcaaagcc

SEQ ID NO: 124063 - DNA, 21 bp, Artificial Sequence
  primer
acagcaatgacacccacagac

SEQ ID NO: 124064 - DNA, 38 bp, Artificial Sequence
  primer
gtaaaacgacggccagtcaaaggtatcaggaccctccc

SEQ ID NO: 124065 - DNA, 20 bp, Artificial Sequence
  primer
caaggcctatgtcctcgttg

SEQ ID NO: 124066 - DNA, 37 bp, Artificial Sequence
  primer
gtaaaacgacggccagtctgctcctccaaggactgtg

SEQ ID NO: 124067 - DNA, 21 bp, Artificial Sequence
  primer
cagaggaccacacatggtgac

SEQ ID NO: 124068 - DNA, 38 bp, Artificial Sequence
  primer
gtaaaacgacggccagttcttgatgctttcgtggattg

SEQ ID NO: 124069 - DNA, 20 bp, Artificial Sequence
  primer
aaaggcttctccctacaggc

SEQ ID NO: 124070 - DNA, 18 bp, Artificial Sequence
  primer
cccgggttcacgtcattc

SEQ ID NO: 124071 - DNA, 21 bp, Artificial Sequence
  primer
ctctgagcagtcctcctgttg

SEQ ID NO: 124072 - DNA, 21 bp, Artificial Sequence
  primer
ctgtagagctgggccaacaac

SEQ ID NO: 124073 - DNA, 21 bp, Artificial Sequence
  primer
gagttcaagtgggtcaaaggc

SEQ ID NO: 124074 - DNA, 38 bp, Artificial Sequence
  primer
gtaaaacgacggccagtctcagatttgacacagtgggc

SEQ ID NO: 124075 - DNA, 21 bp, Artificial Sequence
  primer
ccacactccctgactaatccc

SEQ ID NO: 124076 - DNA, 39 bp, Artificial Sequence
  primer
gtaaaacgacggccagtcaaggatacggctacagcaaag

SEQ ID NO: 124077 - DNA, 21 bp, Artificial Sequence
  primer
aagtacctgagtaccacgggc

SEQ ID NO: 124078 - DNA, 21 bp, Artificial Sequence
  primer
gcactgcagcaatgaactagg

SEQ ID NO: 124079 - DNA, 37 bp, Artificial Sequence
  primer
gtaaaacgacggccagtagagttcagccgctaggacc

SEQ ID NO: 124080 - DNA, 21 bp, Artificial Sequence
  primer
cctttgttcaacagccacttg

SEQ ID NO: 124081 - DNA, 37 bp, Artificial Sequence
  primer
gtaaaacgacggccagtggatgaaggatcgcactttg

SEQ ID NO: 124082 - DNA, 38 bp, Artificial Sequence
  primer
gtaaaacgacggccagtcaagaaaccttgctttcccag

SEQ ID NO: 124083 - DNA, 22 bp, Artificial Sequence
  primer
gggaagcagcatagaacatgag

SEQ ID NO: 124084 - DNA, 38 bp, Artificial Sequence
  primer
gtaaaacgacggccagtgagatggtctctgtgggaagc

SEQ ID NO: 124085 - DNA, 21 bp, Artificial Sequence
  primer
tgccatgcagtatctgtgtcc

SEQ ID NO: 124086 - DNA, 38 bp, Artificial Sequence
  primer
gtaaaacgacggccagtccctccatattagcagttggc

SEQ ID NO: 124087 - DNA, 38 bp, Artificial Sequence
  primer
gtaaaacgacggccagtatttcaggttggtcatagggc

SEQ ID NO: 124088 - DNA, 21 bp, Artificial Sequence
  primer
ctgccagaccaacttaacgag

SEQ ID NO: 124089 - DNA, 38 bp, Artificial Sequence
  primer
gtaaaacgacggccagtccatccctcattccaagctac

SEQ ID NO: 124090 - DNA, 38 bp, Artificial Sequence
  primer
gtaaaacgacggccagtatccaggagcctggtaatctg

SEQ ID NO: 124091 - DNA, 20 bp, Artificial Sequence
  primer
gaatgcatgcacacatgctc

SEQ ID NO: 124092 - DNA, 37 bp, Artificial Sequence
  primer
gtaaaacgacggccagtgtgtcagagaatgccttgcc

SEQ ID NO: 124093 - DNA, 21 bp, Artificial Sequence
  primer
agaaagccctgtacgggaaag

SEQ ID NO: 124094 - DNA, 38 bp, Artificial Sequence
  primer
gtaaaacgacggccagtggactttgcatccttcctttg

SEQ ID NO: 124095 - DNA, 38 bp, Artificial Sequence
  primer
gtaaaacgacggccagtctgaaaggctccgagatgatg

SEQ ID NO: 124096 - DNA, 21 bp, Artificial Sequence
  primer
tttctcaactgggtcagcaac

SEQ ID NO: 124097 - DNA, 20 bp, Artificial Sequence
  primer
tgcccagaattatgaggtgc

SEQ ID NO: 124098 - DNA, 21 bp, Artificial Sequence
  primer
cagcgcctgacctataatcac

SEQ ID NO: 124099 - DNA, 22 bp, Artificial Sequence
  primer
tgtatggacagggtaggcagag

SEQ ID NO: 124100 - DNA, 21 bp, Artificial Sequence
  primer
ctcaccgtcagcttcatcttg

SEQ ID NO: 124101 - DNA, 19 bp, Artificial Sequence
  primer
ggtacacccaggcgaagac

SEQ ID NO: 124102 - DNA, 36 bp, Artificial Sequence
  primer
gtaaaacgacggccagtgcggtttatagcagcaggg

SEQ ID NO: 124103 - DNA, 37 bp, Artificial Sequence
  primer
gtaaaacgacggccagtcactcaaagtgcatggcgac

SEQ ID NO: 124104 - DNA, 21 bp, Artificial Sequence
  primer
tcgctaataagttgcgacagc

SEQ ID NO: 124105 - DNA, 37 bp, Artificial Sequence
  primer
gtaaaacgacggccagtcaagggacagggaggttgtc

SEQ ID NO: 124106 - DNA, 21 bp, Artificial Sequence
  primer
gcgtcagcttcatcttagtgc

SEQ ID NO: 124107 - DNA, 36 bp, Artificial Sequence
  primer
gtaaaacgacggccagtgcttgaagtcgctgaaggc

SEQ ID NO: 124108 - DNA, 18 bp, Artificial Sequence
  primer
gctgcacgtcctcagctc

SEQ ID NO: 124109 - DNA, 38 bp, Artificial Sequence
  primer
gtaaaacgacggccagtaataaccaagggcgtatcagg

SEQ ID NO: 124110 - DNA, 21 bp, Artificial Sequence
  primer
gaaccaaaggacacgctaagg

SEQ ID NO: 124111 - DNA, 38 bp, Artificial Sequence
  primer
gtaaaacgacggccagtatgtaatgcctccgctttcag

SEQ ID NO: 124112 - DNA, 40 bp, Artificial Sequence
  primer
gtaaaacgacggccagttgtgttaaagagccaagtatccc

SEQ ID NO: 124113 - DNA, 21 bp, Artificial Sequence
  primer
tcctttctcattgctgtctgg

SEQ ID NO: 124114 - DNA, 40 bp, Artificial Sequence
  primer
gtaaaacgacggccagtaaatttgatacttccctgatccc

SEQ ID NO: 124115 - DNA, 38 bp, Artificial Sequence
  primer
gtaaaacgacggccagtagacaactttggagctgggac

SEQ ID NO: 124116 - DNA, 22 bp, Artificial Sequence
  primer
ggcaaatcctgtatgtctctgc

SEQ ID NO: 124117 - DNA, 43 bp, Artificial Sequence
  primer
gtaaaacgacggccagtggaaatcttccacatttgagactaga

SEQ ID NO: 124118 - DNA, 21 bp, Artificial Sequence
  primer
cagaaagctctccgtactgcc

SEQ ID NO: 124119 - DNA, 39 bp, Artificial Sequence
  primer
gtaaaacgacggccagtgcagactgctgcaactcctaag

SEQ ID NO: 124120 - DNA, 21 bp, Artificial Sequence
  primer
atcctcaattacggcctaccc

SEQ ID NO: 124121 - DNA, 35 bp, Artificial Sequence
  primer
gtaaaacgacggccagtcagtccaggcccaacagg

SEQ ID NO: 124122 - DNA, 19 bp, Artificial Sequence
  primer
tgtgatctgccgacctcag

SEQ ID NO: 124123 - DNA, 39 bp, Artificial Sequence
  primer
gtaaaacgacggccagtcacaaggctgaactttgctttc

SEQ ID NO: 124124 - DNA, 18 bp, Artificial Sequence
  primer
tgacctcgtgatccaccc

SEQ ID NO: 124125 - DNA, 39 bp, Artificial Sequence
  primer
gtaaaacgacggccagtaaggtggtatttcaccacatgc

SEQ ID NO: 124126 - DNA, 22 bp, Artificial Sequence
  primer
ggctaaggcaggagaattgaag

SEQ ID NO: 124127 - DNA, 38 bp, Artificial Sequence
  primer
gtaaaacgacggccagttcagcagagttggtaagccag

SEQ ID NO: 124128 - DNA, 21 bp, Artificial Sequence
  primer
aaccctctctaagcacctgcc

SEQ ID NO: 124129 - DNA, 40 bp, Artificial Sequence
  primer
gtaaaacgacggccagtcaggacttcatgtagtgagtggg

SEQ ID NO: 124130 - DNA, 36 bp, Artificial Sequence
  primer
gtaaaacgacggccagtaccaccttcacgatcaggc

SEQ ID NO: 124131 - DNA, 38 bp, Artificial Sequence
  primer
gtaaaacgacggccagtgtcaggacccaagtgcatctc

SEQ ID NO: 124132 - DNA, 38 bp, Artificial Sequence
  primer
gtaaaacgacggccagtcagattcatggcatttaaccg

SEQ ID NO: 124133 - DNA, 21 bp, Artificial Sequence
  primer
caaaggtgatcaaaggcttcc

SEQ ID NO: 124134 - DNA, 21 bp, Artificial Sequence
  primer
gttggcatctgctacataggg

SEQ ID NO: 124135 - DNA, 21 bp, Artificial Sequence
  primer
ccctaataagggctggatcac

SEQ ID NO: 124136 - DNA, 38 bp, Artificial Sequence
  primer
gtaaaacgacggccagtgactacaaatgccttccagcc

SEQ ID NO: 124137 - DNA, 20 bp, Artificial Sequence
  primer
tacaggctttcgcctgtgac

SEQ ID NO: 124138 - DNA, 21 bp, Artificial Sequence
  primer
ctccaccaggtctggaaagtc

SEQ ID NO: 124139 - DNA, 19 bp, Artificial Sequence
  primer
gtggttcatgaggcacacg

SEQ ID NO: 124140 - DNA, 38 bp, Artificial Sequence
  primer
gtaaaacgacggccagtatgtcctccacacactcttgg

SEQ ID NO: 124141 - DNA, 38 bp, Artificial Sequence
  primer
gtaaaacgacggccagtacgttcttcccgttcttgttg

SEQ ID NO: 124142 - DNA, 38 bp, Artificial Sequence
  primer
gtaaaacgacggccagtttcctctgctgttcaaggatg

SEQ ID NO: 124143 - DNA, 38 bp, Artificial Sequence
  primer
gtaaaacgacggccagtgttagttacagggcagccagg

SEQ ID NO: 124144 - DNA, 38 bp, Artificial Sequence
  primer
gtaaaacgacggccagtgggttggctcatgatacactg

SEQ ID NO: 124145 - DNA, 21 bp, Artificial Sequence
  primer
agctgattccattgtggcttg

SEQ ID NO: 124146 - DNA, 40 bp, Artificial Sequence
  primer
gtaaaacgacggccagttgaccaatttctgtacgtaagcg

SEQ ID NO: 124147 - DNA, 38 bp, Artificial Sequence
  primer
gtaaaacgacggccagtgtacttcagaaggccaccacc

SEQ ID NO: 124148 - DNA, 20 bp, Artificial Sequence
  primer
aagccatcatggtgatcagg

SEQ ID NO: 124149 - DNA, 38 bp, Artificial Sequence
  primer
gtaaaacgacggccagtaccatttgatccacgaaagtg

SEQ ID NO: 124150 - DNA, 38 bp, Artificial Sequence
  primer
gtaaaacgacggccagtcctctgttgtcttctcctggg

SEQ ID NO: 124151 - DNA, 38 bp, Artificial Sequence
  primer
gtaaaacgacggccagttctgtgggttcgtcagttgtc

SEQ ID NO: 124152 - DNA, 38 bp, Artificial Sequence
  primer
gtaaaacgacggccagtgacacttcagtcttgggaggc

SEQ ID NO: 124153 - DNA, 21 bp, Artificial Sequence
  primer
acgatcccatacgtccttcag

SEQ ID NO: 124154 - DNA, 21 bp, Artificial Sequence
  primer
gaattgatgggactctggagc

SEQ ID NO: 124155 - DNA, 21 bp, Artificial Sequence
  primer
ggattcttcatcagctcccag

SEQ ID NO: 124156 - DNA, 38 bp, Artificial Sequence
  primer
gtaaaacgacggccagtaaacagcctttgaatgatgcc

SEQ ID NO: 124157 - DNA, 21 bp, Artificial Sequence
  primer
ttccgatgcctctacgatttc

SEQ ID NO: 124158 - DNA, 21 bp, Artificial Sequence
  primer
aaatagggccgctttcttgag

SEQ ID NO: 124159 - DNA, 38 bp, Artificial Sequence
  primer
gtaaaacgacggccagtgtgggtacctcggttgtcttc

SEQ ID NO: 124160 - DNA, 21 bp, Artificial Sequence
  primer
ctccgggtggagatgagatac

SEQ ID NO: 124161 - DNA, 38 bp, Artificial Sequence
  primer
gtaaaacgacggccagttcagaatccagtttcagcacc

SEQ ID NO: 124162 - DNA, 38 bp, Artificial Sequence
  primer
gtaaaacgacggccagtacgagttatgggaagcaccag

SEQ ID NO: 124163 - DNA, 38 bp, Artificial Sequence
  primer
gtaaaacgacggccagtcatcagccttgaagcacactc

SEQ ID NO: 124164 - DNA, 38 bp, Artificial Sequence
  primer
gtaaaacgacggccagttccataccttatcctcccacg

SEQ ID NO: 124165 - DNA, 38 bp, Artificial Sequence
  primer
gtaaaacgacggccagtgcactgcacgttgaataggag

SEQ ID NO: 124166 - DNA, 21 bp, Artificial Sequence
  primer
aggccaaagcaggtcattaag

SEQ ID NO: 124167 - DNA, 21 bp, Artificial Sequence
  primer
tgccaacgatttggaatatgg

SEQ ID NO: 124168 - DNA, 39 bp, Artificial Sequence
  primer
gtaaaacgacggccagttccaagtaacaggtgatccaaa

SEQ ID NO: 124169 - DNA, 41 bp, Artificial Sequence
  primer
gtaaaacgacggccagtaatttctagctcagtccctacgag

SEQ ID NO: 124170 - DNA, 21 bp, Artificial Sequence
  primer
ctggtgccagattagccagag

SEQ ID NO: 124171 - DNA, 25 bp, Artificial Sequence
  primer
catcactatctgaaggacaaatgct

SEQ ID NO: 124172 - DNA, 21 bp, Artificial Sequence
  primer
taaaggctgttgggaacagtg

SEQ ID NO: 124173 - DNA, 38 bp, Artificial Sequence
  primer
gtaaaacgacggccagtctgggtccatttgtggttatc

SEQ ID NO: 124174 - DNA, 25 bp, Artificial Sequence
  primer
gatcttaggcaacttgagggattac

SEQ ID NO: 124175 - DNA, 37 bp, Artificial Sequence
  primer
gtaaaacgacggccagtaaatcggagcaaccataccc

SEQ ID NO: 124176 - DNA, 21 bp, Artificial Sequence
  primer
ttacagggactccgtttccac

SEQ ID NO: 124177 - DNA, 40 bp, Artificial Sequence
  primer
gtaaaacgacggccagtttctcaaggtataagcaaccgaa

SEQ ID NO: 124178 - DNA, 21 bp, Artificial Sequence
  primer
aaggtcccaaactaatggcaa

SEQ ID NO: 124179 - DNA, 24 bp, Artificial Sequence
  primer
tttacttaggtctaccgccaaatc

SEQ ID NO: 124180 - DNA, 39 bp, Artificial Sequence
  primer
gtaaaacgacggccagtccttcctctcactttaacctgc

SEQ ID NO: 124181 - DNA, 40 bp, Artificial Sequence
  primer
gtaaaacgacggccagtgttggaaaggaccttagaggttt

SEQ ID NO: 124182 - DNA, 19 bp, Artificial Sequence
  primer
cactgtgcctagcctccaa

SEQ ID NO: 124183 - DNA, 38 bp, Artificial Sequence
  primer
gtaaaacgacggccagtaagctgcttgtctgttgtggt

SEQ ID NO: 124184 - DNA, 44 bp, Artificial Sequence
  primer
gtaaaacgacggccagttgggtacacagtacattcagatatcac

SEQ ID NO: 124185 - DNA, 22 bp, Artificial Sequence
  primer
tcaggcagcttctgtccatatc

SEQ ID NO: 124186 - DNA, 21 bp, Artificial Sequence
  primer
gcacagactcacaggcttacc

SEQ ID NO: 124187 - DNA, 41 bp, Artificial Sequence
  primer
gtaaaacgacggccagtaacagacctcagaatttcaagtgc

SEQ ID NO: 124188 - DNA, 23 bp, Artificial Sequence
  primer
cacacccaatagctgattgctac

SEQ ID NO: 124189 - DNA, 38 bp, Artificial Sequence
  primer
gtaaaacgacggccagttttaagcggtgagatcccaaa

SEQ ID NO: 124190 - DNA, 21 bp, Artificial Sequence
  primer
atgacttaggcaaaccaaccc

SEQ ID NO: 124191 - DNA, 38 bp, Artificial Sequence
  primer
gtaaaacgacggccagtccgtgagtcaaacctctttcc

SEQ ID NO: 124192 - DNA, 21 bp, Artificial Sequence
  primer
taccctccttgttcttcctgg

SEQ ID NO: 124193 - DNA, 21 bp, Artificial Sequence
  primer
tacagtggatggatgtgggac

SEQ ID NO: 124194 - DNA, 38 bp, Artificial Sequence
  primer
gtaaaacgacggccagttcatttctctacccacccacc

SEQ ID NO: 124195 - DNA, 38 bp, Artificial Sequence
  primer
gtaaaacgacggccagtgtgcattgtggcattgctaag

SEQ ID NO: 124196 - DNA, 21 bp, Artificial Sequence
  primer
cacttgtcattgtgctgaggc

SEQ ID NO: 124197 - DNA, 38 bp, Artificial Sequence
  primer
gtaaaacgacggccagtactttgggcctcagcttcttc

SEQ ID NO: 124198 - DNA, 21 bp, Artificial Sequence
  primer
aggatgggctgtgcatcttag

SEQ ID NO: 124199 - DNA, 21 bp, Artificial Sequence
  primer
tgcaagggttaagtttggtgc

SEQ ID NO: 124200 - DNA, 37 bp, Artificial Sequence
  primer
gtaaaacgacggccagtgctgggttgagtcagtcagg

SEQ ID NO: 124201 - DNA, 38 bp, Artificial Sequence
  primer
gtaaaacgacggccagtgatggcaaagtggaaacattc

SEQ ID NO: 124202 - DNA, 38 bp, Artificial Sequence
  primer
gtaaaacgacggccagtctgaaacaatgccaagtgagc

SEQ ID NO: 124203 - DNA, 38 bp, Artificial Sequence
  primer
gtaaaacgacggccagtaaaggccagggttgaaagaag

SEQ ID NO: 124204 - DNA, 38 bp, Artificial Sequence
  primer
gtaaaacgacggccagttttaacaatgtttcccggctc

SEQ ID NO: 124205 - DNA, 36 bp, Artificial Sequence
  primer
gtaaaacgacggccagtcctacagctatggctgccc

SEQ ID NO: 124206 - DNA, 21 bp, Artificial Sequence
  primer
tgggagtctgttggtttcaag

SEQ ID NO: 124207 - DNA, 43 bp, Artificial Sequence
  primer
gtaaaacgacggccagttggaatatacttactttccaccttcc

SEQ ID NO: 124208 - DNA, 37 bp, Artificial Sequence
  primer
gtaaaacgacggccagtccggtttgctggctcttatc

SEQ ID NO: 124209 - DNA, 38 bp, Artificial Sequence
  primer
gtaaaacgacggccagtgtgtcccacacattcctcatc

SEQ ID NO: 124210 - DNA, 37 bp, Artificial Sequence
  primer
gtaaaacgacggccagtttagctgccttagatggccc

SEQ ID NO: 124211 - DNA, 20 bp, Artificial Sequence
  primer
atgagactgtcgctggcttg

SEQ ID NO: 124212 - DNA, 21 bp, Artificial Sequence
  primer
cgagacctttgaagcaaggag

SEQ ID NO: 124213 - DNA, 21 bp, Artificial Sequence
  primer
atcgcaagctagatgctaccc

SEQ ID NO: 124214 - DNA, 38 bp, Artificial Sequence
  primer
gtaaaacgacggccagttgctgacagcctctcacattg

SEQ ID NO: 124215 - DNA, 21 bp, Artificial Sequence
  primer
ctccgcaaacactcactcttg

SEQ ID NO: 124216 - DNA, 22 bp, Artificial Sequence
  primer
tctcctcacctacaaggcagag

SEQ ID NO: 124217 - DNA, 20 bp, Artificial Sequence
  primer
ccctggagccagttatcctc

SEQ ID NO: 124218 - DNA, 21 bp, Artificial Sequence
  primer
cacatcacactgggtgtctgg

SEQ ID NO: 124219 - DNA, 21 bp, Artificial Sequence
  primer
tcgtagaagctgtgatgctgg

SEQ ID NO: 124220 - DNA, 38 bp, Artificial Sequence
  primer
gtaaaacgacggccagtagaagtgacagcccaatgtcc

SEQ ID NO: 124221 - DNA, 21 bp, Artificial Sequence
  primer
gcatgggactaagggaggaag

SEQ ID NO: 124222 - DNA, 21 bp, Artificial Sequence
  primer
ggatgctcagcggatctagtg

SEQ ID NO: 124223 - DNA, 21 bp, Artificial Sequence
  primer
aatggtttctcacaatgcagg

SEQ ID NO: 124224 - DNA, 38 bp, Artificial Sequence
  primer
gtaaaacgacggccagtaggcaggagatcttacgcttg

SEQ ID NO: 124225 - DNA, 20 bp, Artificial Sequence
  primer
cgtcccagtagctgaaggtg

SEQ ID NO: 124226 - DNA, 21 bp, Artificial Sequence
  primer
acttgtcccacttcttctcgg

SEQ ID NO: 124227 - DNA, 39 bp, Artificial Sequence
  primer
gtaaaacgacggccagtaaatcaagtgactggtgatggg

SEQ ID NO: 124228 - DNA, 19 bp, Artificial Sequence
  primer
acaccagggactgttgtgg

SEQ ID NO: 124229 - DNA, 37 bp, Artificial Sequence
  primer
gtaaaacgacggccagttggatgcctggatcctactg

SEQ ID NO: 124230 - DNA, 21 bp, Artificial Sequence
  primer
caggcttaggactggatttgg

SEQ ID NO: 124231 - DNA, 37 bp, Artificial Sequence
  primer
gtaaaacgacggccagtccactgggactgtggtgaac

SEQ ID NO: 124232 - DNA, 21 bp, Artificial Sequence
  primer
attacactgatgggctctggg

SEQ ID NO: 124233 - DNA, 20 bp, Artificial Sequence
  primer
cagaccactcttgaccacgg

SEQ ID NO: 124234 - DNA, 20 bp, Artificial Sequence
  primer
gagtccagaccttggagctg

SEQ ID NO: 124235 - DNA, 37 bp, Artificial Sequence
  primer
gtaaaacgacggccagttcgaccacacagcactcctc

SEQ ID NO: 124236 - DNA, 38 bp, Artificial Sequence
  primer
gtaaaacgacggccagttaagaaagcctcacctgggtc

SEQ ID NO: 124237 - DNA, 38 bp, Artificial Sequence
  primer
gtaaaacgacggccagtcagagaatcagccagcctcac

SEQ ID NO: 124238 - DNA, 21 bp, Artificial Sequence
  primer
cagtcaagctctgctcctgtg

SEQ ID NO: 124239 - DNA, 20 bp, Artificial Sequence
  primer
ccttcactcaggcaccgtag

SEQ ID NO: 124240 - DNA, 21 bp, Artificial Sequence
  primer
gctgaagctggaactcctctg

SEQ ID NO: 124241 - DNA, 21 bp, Artificial Sequence
  primer
ctgctcttgcacttcttcagg

SEQ ID NO: 124242 - DNA, 38 bp, Artificial Sequence
  primer
gtaaaacgacggccagttctatgcttgtctaggacggc

SEQ ID NO: 124243 - DNA, 19 bp, Artificial Sequence
  primer
gagcagaggctgttcccag

SEQ ID NO: 124244 - DNA, 20 bp, Artificial Sequence
  primer
gaagctttcatcaggcccac

SEQ ID NO: 124245 - DNA, 21 bp, Artificial Sequence
  primer
tgagccattagtgggctcttc

SEQ ID NO: 124246 - DNA, 21 bp, Artificial Sequence
  primer
ctagccctggtcactggaaac

SEQ ID NO: 124247 - DNA, 21 bp, Artificial Sequence
  primer
aggaagcttctctggatctgg

SEQ ID NO: 124248 - DNA, 38 bp, Artificial Sequence
  primer
gtaaaacgacggccagtaggactcagcatcactctccc

SEQ ID NO: 124249 - DNA, 36 bp, Artificial Sequence
  primer
gtaaaacgacggccagtcgggcatccagatcacaag

SEQ ID NO: 124250 - DNA, 21 bp, Artificial Sequence
  primer
ggcagggtaatgaagctaggg

SEQ ID NO: 124251 - DNA, 37 bp, Artificial Sequence
  primer
gtaaaacgacggccagtagaagatttccagctgccct

SEQ ID NO: 124252 - DNA, 41 bp, Artificial Sequence
  primer
gtaaaacgacggccagtgaagcaacaactttgccttaaatc

SEQ ID NO: 124253 - DNA, 38 bp, Artificial Sequence
  primer
gtaaaacgacggccagtggcttgttcccaagggtaaac

SEQ ID NO: 124254 - DNA, 38 bp, Artificial Sequence
  primer
gtaaaacgacggccagtagtagggcacagcacagtttg

SEQ ID NO: 124255 - DNA, 46 bp, Artificial Sequence
  primer
gtaaaacgacggccagttcacttaaatactagatgttcctgtatgc

SEQ ID NO: 124256 - DNA, 24 bp, Artificial Sequence
  primer
tcaaattacaacaacataccgctc

SEQ ID NO: 124257 - DNA, 44 bp, Artificial Sequence
  primer
gtaaaacgacggccagtcattatctctaggagaggtattcaggg

SEQ ID NO: 124258 - DNA, 43 bp, Artificial Sequence
  primer
gtaaaacgacggccagtaaacaattatatagcccattctgcac

SEQ ID NO: 124259 - DNA, 41 bp, Artificial Sequence
  primer
gtaaaacgacggccagtgcctttaacagtccaaatcagttt

SEQ ID NO: 124260 - DNA, 21 bp, Artificial Sequence
  primer
agtcaatgttgggagggtcag

SEQ ID NO: 124261 - DNA, 38 bp, Artificial Sequence
  primer
gtaaaacgacggccagtcctacttgggcagtaccaagg

SEQ ID NO: 124262 - DNA, 21 bp, Artificial Sequence
  primer
agcccacagttctcattcctc

SEQ ID NO: 124263 - DNA, 36 bp, Artificial Sequence
  primer
gtaaaacgacggccagtcctatcctgcccaagagcc

SEQ ID NO: 124264 - DNA, 20 bp, Artificial Sequence
  primer
cactggcaagcaggtagtca

SEQ ID NO: 124265 - DNA, 21 bp, Artificial Sequence
  primer
gaaacatctgcggtgaggaag

SEQ ID NO: 124266 - DNA, 38 bp, Artificial Sequence
  primer
gtaaaacgacggccagtatgttgcaatgggcaatgtag

SEQ ID NO: 124267 - DNA, 38 bp, Artificial Sequence
  primer
gtaaaacgacggccagtctgctaggaattgtgctccag

SEQ ID NO: 124268 - DNA, 41 bp, Artificial Sequence
  primer
gtaaaacgacggccagtagctcaaacgagagaatagagacc

SEQ ID NO: 124269 - DNA, 38 bp, Artificial Sequence
  primer
gtaaaacgacggccagttatgcaatggtcatgtcccag

SEQ ID NO: 124270 - DNA, 21 bp, Artificial Sequence
  primer
tccttacatagccttcctccc

SEQ ID NO: 124271 - DNA, 20 bp, Artificial Sequence
  primer
gggttgcatcacaccatttg

SEQ ID NO: 124272 - DNA, 21 bp, Artificial Sequence
  primer
cattgccaaagggatttatgc

SEQ ID NO: 124273 - DNA, 38 bp, Artificial Sequence
  primer
gtaaaacgacggccagtgtgccgttgttgaagtcagtc

SEQ ID NO: 124274 - DNA, 38 bp, Artificial Sequence
  primer
gtaaaacgacggccagttagtggtcatgtgggtcaagg

SEQ ID NO: 124275 - DNA, 38 bp, Artificial Sequence
  primer
gtaaaacgacggccagttccctgtgaacacactccaag

SEQ ID NO: 124276 - DNA, 39 bp, Artificial Sequence
  primer
gtaaaacgacggccagtggttgatgtaatttgtcccagg

SEQ ID NO: 124277 - DNA, 19 bp, Artificial Sequence
  primer
caaggacaggagcgaatgg

SEQ ID NO: 124278 - DNA, 21 bp, Artificial Sequence
  primer
tgagcacgcaaatacttaccg

SEQ ID NO: 124279 - DNA, 21 bp, Artificial Sequence
  primer
agattcccaggaagacacacg

SEQ ID NO: 124280 - DNA, 38 bp, Artificial Sequence
  primer
gtaaaacgacggccagtttgggccaagttgagagagag

SEQ ID NO: 124281 - DNA, 22 bp, Artificial Sequence
  primer
tgtgcccagaagtaactatggc

SEQ ID NO: 124282 - DNA, 21 bp, Artificial Sequence
  primer
ctgtcacacatctctccaggg

SEQ ID NO: 124283 - DNA, 38 bp, Artificial Sequence
  primer
gtaaaacgacggccagtctccagtcccttccaagacag

SEQ ID NO: 124284 - DNA, 20 bp, Artificial Sequence
  primer
ggcagtcatctctcactggg

SEQ ID NO: 124285 - DNA, 23 bp, Artificial Sequence
  primer
gccaaccttagataagccagatg

SEQ ID NO: 124286 - DNA, 23 bp, Artificial Sequence
  primer
ggaatttcccatattcccttctc

SEQ ID NO: 124287 - DNA, 21 bp, Artificial Sequence
  primer
ccatagtgtctgggcttctca

SEQ ID NO: 124288 - DNA, 19 bp, Artificial Sequence
  primer
ctcctcgtcttccagcagc

SEQ ID NO: 124289 - DNA, 35 bp, Artificial Sequence
  primer
gtaaaacgacggccagtgactacgaaggcgggagc

SEQ ID NO: 124290 - DNA, 38 bp, Artificial Sequence
  primer
gtaaaacgacggccagtcccactaaagtccaaacgagc

SEQ ID NO: 124291 - DNA, 20 bp, Artificial Sequence
  primer
atagtgtgaacctgggaggc

SEQ ID NO: 124292 - DNA, 38 bp, Artificial Sequence
  primer
gtaaaacgacggccagtcagcaggtaagacgtgtgctc

SEQ ID NO: 124293 - DNA, 22 bp, Artificial Sequence
  primer
ggagtttgcatgcgaatcttag

SEQ ID NO: 124294 - DNA, 21 bp, Artificial Sequence
  primer
ctcccacaggattcacacaac

SEQ ID NO: 124295 - DNA, 39 bp, Artificial Sequence
  primer
gtaaaacgacggccagtcgcaggtcttaaccattctcac

SEQ ID NO: 124296 - DNA, 38 bp, Artificial Sequence
  primer
gtaaaacgacggccagtaaagagtcacagcacccaatg

SEQ ID NO: 124297 - DNA, 21 bp, Artificial Sequence
  primer
ctgtgctggaatgagagcttg

SEQ ID NO: 124298 - DNA, 23 bp, Artificial Sequence
  primer
cctgctgtaatagacagcacaga

SEQ ID NO: 124299 - DNA, 20 bp, Artificial Sequence
  primer
cactgtgtgatggtgaaggg

SEQ ID NO: 124300 - DNA, 21 bp, Artificial Sequence
  primer
tctggctctacaaatccctgc

SEQ ID NO: 124301 - DNA, 20 bp, Artificial Sequence
  primer
agtgctgcacaaagcagtgg

SEQ ID NO: 124302 - DNA, 19 bp, Artificial Sequence
  primer
gtatttgcaacccggcatc

SEQ ID NO: 124303 - DNA, 38 bp, Artificial Sequence
  primer
gtaaaacgacggccagtatacacgggtcacaactcagc

SEQ ID NO: 124304 - DNA, 21 bp, Artificial Sequence
  primer
gcaacaatatctcctccctgc

SEQ ID NO: 124305 - DNA, 21 bp, Artificial Sequence
  primer
ctgctgcgttaaacgactctc

SEQ ID NO: 124306 - DNA, 21 bp, Artificial Sequence
  primer
aaggcggtgtctacatcatcc

SEQ ID NO: 124307 - DNA, 23 bp, Artificial Sequence
  primer
ttctcaacagctgatttatgtgc

SEQ ID NO: 124308 - DNA, 40 bp, Artificial Sequence
  primer
gtaaaacgacggccagtcagacatggtctaaacactgcac

SEQ ID NO: 124309 - DNA, 21 bp, Artificial Sequence
  primer
aggtggtgacggatacaggac

SEQ ID NO: 124310 - DNA, 38 bp, Artificial Sequence
  primer
gtaaaacgacggccagttggtacgtctgtgagagggtg

SEQ ID NO: 124311 - DNA, 21 bp, Artificial Sequence
  primer
tacccaactcatgacccactc

SEQ ID NO: 124312 - DNA, 38 bp, Artificial Sequence
  primer
gtaaaacgacggccagtaacgactccagagagtccagg

SEQ ID NO: 124313 - DNA, 38 bp, Artificial Sequence
  primer
gtaaaacgacggccagtctgcagaatgtaccttccagg

SEQ ID NO: 124314 - DNA, 38 bp, Artificial Sequence
  primer
gtaaaacgacggccagtgaaaggaagccatcacctgac

SEQ ID NO: 124315 - DNA, 41 bp, Artificial Sequence
  primer
gtaaaacgacggccagtggtgagactgggtaatcaactagc

SEQ ID NO: 124316 - DNA, 41 bp, Artificial Sequence
  primer
gtaaaacgacggccagttgctgccagctactaatagaaacc

SEQ ID NO: 124317 - DNA, 39 bp, Artificial Sequence
  primer
gtaaaacgacggccagtcctgagggtctactaaccaccc

SEQ ID NO: 124318 - DNA, 22 bp, Artificial Sequence
  primer
ccagcctatggatggttacttc

SEQ ID NO: 124319 - DNA, 22 bp, Artificial Sequence
  primer
accttgtatttggtcatggtgc

SEQ ID NO: 124320 - DNA, 20 bp, Artificial Sequence
  primer
ctctttgagggcaggaactg

SEQ ID NO: 124321 - DNA, 20 bp, Artificial Sequence
  primer
aggtcagacagcagggattg

SEQ ID NO: 124322 - DNA, 20 bp, Artificial Sequence
  primer
cacacagcaggtcagagcag

SEQ ID NO: 124323 - DNA, 38 bp, Artificial Sequence
  primer
gtaaaacgacggccagtagtgaggttagcagctctggc

SEQ ID NO: 124324 - DNA, 36 bp, Artificial Sequence
  primer
gtaaaacgacggccagtagacccagggagggaggag

SEQ ID NO: 124325 - DNA, 21 bp, Artificial Sequence
  primer
ttctttgtattgaggatgccc

SEQ ID NO: 124326 - DNA, 20 bp, Artificial Sequence
  primer
gctcacttgagcctgggaag

SEQ ID NO: 124327 - DNA, 39 bp, Artificial Sequence
  primer
gtaaaacgacggccagttttcctcaggatggagaatctg

SEQ ID NO: 124328 - DNA, 20 bp, Artificial Sequence
  primer
tttcgaagtgggacatagcg

SEQ ID NO: 124329 - DNA, 21 bp, Artificial Sequence
  primer
gtccgttcccagctaatgttc

SEQ ID NO: 124330 - DNA, 21 bp, Artificial Sequence
  primer
tttcgcaacattctctctccc

SEQ ID NO: 124331 - DNA, 38 bp, Artificial Sequence; identical to SEQ ID NO: 1457
  primer

SEQ ID NO: 124332 - DNA, 42 bp, Artificial Sequence
  primer
gtaaaacgacggccagtcctgcactttcatctaactacttgc

SEQ ID NO: 124333 - DNA, 23 bp, Artificial Sequence
  primer
tggagacacagccttagacactc

SEQ ID NO: 124334 - DNA, 22 bp, Artificial Sequence
  primer
ggatttatggctgaaaccaaac

SEQ ID NO: 124335 - DNA, 22 bp, Artificial Sequence
  primer
tcagtgccactttcttattgcc

SEQ ID NO: 124336 - DNA, 24 bp, Artificial Sequence
  primer
cacaaacatccttaaggctaatgc

SEQ ID NO: 124337 - DNA, 18 bp, Artificial Sequence
  primer
ggaaccgcagagggagtc

SEQ ID NO: 124338 - DNA, 42 bp, Artificial Sequence
  primer
gtaaaacgacggccagtaagcaatgccacattatatcagaag

SEQ ID NO: 124339 - DNA, 26 bp, Artificial Sequence
  primer
tcctaagatcattctttcctaagtgg

SEQ ID NO: 124340 - DNA, 22 bp, Artificial Sequence
  primer
ctgttggatgttctctgtgtgc

SEQ ID NO: 124341 - DNA, 23 bp, Artificial Sequence
  primer
atttgtgtgcaattcagtctgtc

SEQ ID NO: 124342 - DNA, 20 bp, Artificial Sequence
  primer
ttctcaaagagcactgctgg

SEQ ID NO: 124343 - DNA, 21 bp, Artificial Sequence
  primer
acagcagtaggaaggagctgg

SEQ ID NO: 124344 - DNA, 38 bp, Artificial Sequence
  primer
gtaaaacgacggccagtagggtccacttcaatgtccac

SEQ ID NO: 124345 - DNA, 38 bp, Artificial Sequence
  primer
gtaaaacgacggccagtggctcagaaactctgtttggc

SEQ ID NO: 124346 - DNA, 22 bp, Artificial Sequence
  primer
cagcaatcgatcatctgaactg

SEQ ID NO: 124347 - DNA, 38 bp, Artificial Sequence
  primer
gtaaaacgacggccagtggactcaagtgatctgcccac

SEQ ID NO: 124348 - DNA, 26 bp, Artificial Sequence
  primer
ttgatagaaataaggaccatgaattt

SEQ ID NO: 124349 - DNA, 40 bp, Artificial Sequence
  primer
gtaaaacgacggccagtcaaggctaagaattcctctgtcc

SEQ ID NO: 124350 - DNA, 46 bp, Artificial Sequence
  primer
gtaaaacgacggccagttctataaggtgttctttcatgtctgtaaa

SEQ ID NO: 124351 - DNA, 20 bp, Artificial Sequence
  primer
ggattacgggcggtctttac

SEQ ID NO: 124352 - DNA, 25 bp, Artificial Sequence
  primer
gtttaattacattgatggcatgtgt

SEQ ID NO: 124353 - DNA, 20 bp, Artificial Sequence
  primer
gtagaagggaggcggcatag

SEQ ID NO: 124354 - DNA, 40 bp, Artificial Sequence
  primer
gtaaaacgacggccagtaaattacctgtaggcagactggg

SEQ ID NO: 124355 - DNA, 38 bp, Artificial Sequence
  primer
gtaaaacgacggccagttgtaacagcccaagctttgat

SEQ ID NO: 124356 - DNA, 39 bp, Artificial Sequence
  primer
gtaaaacgacggccagtgagttagatgtgggtgacctcc

SEQ ID NO: 124357 - DNA, 19 bp, Artificial Sequence
  primer
aggaatgcaagccatttgc

SEQ ID NO: 124358 - DNA, 22 bp, Artificial Sequence
  primer
cccagctggtttctcctgtaag

SEQ ID NO: 124359 - DNA, 22 bp, Artificial Sequence
  primer
tggcaacatgatacaaggaaac

SEQ ID NO: 124360 - DNA, 38 bp, Artificial Sequence
  primer
gtaaaacgacggccagtggcaagaaacaattgaacagc

SEQ ID NO: 124361 - DNA, 22 bp, Artificial Sequence
  primer
aggttcataggtagttgcaggg

SEQ ID NO: 124362 - DNA, 38 bp, Artificial Sequence
  primer
gtaaaacgacggccagttggcctggctacagaggtatc

SEQ ID NO: 124363 - DNA, 37 bp, Artificial Sequence
  primer
gtaaaacgacggccagtttctgagggtcttcattggg

SEQ ID NO: 124364 - DNA, 38 bp, Artificial Sequence
  primer
gtaaaacgacggccagttgccaagacagaacaaacagg

SEQ ID NO: 124365 - DNA, 26 bp, Artificial Sequence
  primer
gcagagaacttaaaggtttcattcag

SEQ ID NO: 124366 - DNA, 23 bp, Artificial Sequence
  primer
tgaactgtttccctcttagacca

SEQ ID NO: 124367 - DNA, 36 bp, Artificial Sequence
  primer
gtaaaacgacggccagtttccacagcatggagcttg

SEQ ID NO: 124368 - DNA, 22 bp, Artificial Sequence
  primer
catggcgtatatgagtgagctg

SEQ ID NO: 124369 - DNA, 21 bp, Artificial Sequence
  primer
ggttcaaattcctgggatagg

SEQ ID NO: 124370 - DNA, 21 bp, Artificial Sequence
  primer
gcctctggactcctattgtgg

SEQ ID NO: 124371 - DNA, 39 bp, Artificial Sequence
  primer
gtaaaacgacggccagtggccattagctcaaagtggaag

SEQ ID NO: 124372 - DNA, 41 bp, Artificial Sequence
  primer
gtaaaacgacggccagtcattagaagcagtaaacatcccag

SEQ ID NO: 124373 - DNA, 21 bp, Artificial Sequence
  primer
gttctttcctcggttcaccac

SEQ ID NO: 124374 - DNA, 22 bp, Artificial Sequence
  primer
ttctggctcctcaaacagtagg

SEQ ID NO: 124375 - DNA, 44 bp, Artificial Sequence
  primer
gtaaaacgacggccagtgcagcatttaacgtaagaaacaaatag

SEQ ID NO: 124376 - DNA, 26 bp, Artificial Sequence
  primer
gaaattgttcttccaatgtaaatcag

SEQ ID NO: 124377 - DNA, 21 bp, Artificial Sequence
  primer
ggatgacaagagcgaaactcc

SEQ ID NO: 124378 - DNA, 25 bp, Artificial Sequence
  primer
gggctagttaatggatttagcactc

SEQ ID NO: 124379 - DNA, 39 bp, Artificial Sequence
  primer
gtaaaacgacggccagttgctcaagtccctcactgaatc

SEQ ID NO: 124380 - DNA, 23 bp, Artificial Sequence
  primer
gcagcctatttctcattcaggtg

SEQ ID NO: 124381 - DNA, 43 bp, Artificial Sequence
  primer
gtaaaacgacggccagttcaatttacacttgaaatgaacacac

SEQ ID NO: 124382 - DNA, 24 bp, Artificial Sequence
  primer
tttacacggttaaatggtcacaac

SEQ ID NO: 124383 - DNA, 24 bp, Artificial Sequence
  primer
tcgtaagtagatgtgctcttggtg

SEQ ID NO: 124384 - DNA, 39 bp, Artificial Sequence
  primer
gtaaaacgacggccagtgcagagacctaatgccactctc

SEQ ID NO: 124385 - DNA, 27 bp, Artificial Sequence
  primer
ttcatctaccttaagatgccttacatt

SEQ ID NO: 124386 - DNA, 24 bp, Artificial Sequence
  primer
tctctaatctccatgcaagtgttc

SEQ ID NO: 124387 - DNA, 38 bp, Artificial Sequence
  primer
gtaaaacgacggccagtaggtatggcactgtttctggc

SEQ ID NO: 124388 - DNA, 21 bp, Artificial Sequence
  primer
tgtggtatgttcaagggttgg

SEQ ID NO: 124389 - DNA, 21 bp, Artificial Sequence
  primer
attgattctggcaagggtttg

SEQ ID NO: 124390 - DNA, 20 bp, Artificial Sequence
  primer
cctcctcatcctcctccaag

SEQ ID NO: 124391 - DNA, 43 bp, Artificial Sequence
  primer
gtaaaacgacggccagtagtaatgaccttaacttctgagaccc

SEQ ID NO: 124392 - DNA, 36 bp, Artificial Sequence
  primer
gtaaaacgacggccagttcttgtggatgctgccttg

SEQ ID NO: 124393 - DNA, 37 bp, Artificial Sequence
  primer
gtaaaacgacggccagtctcctgccctttccaagaac

SEQ ID NO: 124394 - DNA, 21 bp, Artificial Sequence
  primer
tgtaaacacgccgatcagttg

SEQ ID NO: 124395 - DNA, 22 bp, Artificial Sequence
  primer
cctcgaaacttgttctcattgg

SEQ ID NO: 124396 - DNA, 18 bp, Artificial Sequence
  primer
accagctcctccagagcc

SEQ ID NO: 124397 - DNA, 18 bp, Artificial Sequence
  primer
gggctggaagtgcgtctc

SEQ ID NO: 124398 - DNA, 20 bp, Artificial Sequence
  primer
caggcctcaatttcccattc

SEQ ID NO: 124399 - DNA, 39 bp, Artificial Sequence
  primer
gtaaaacgacggccagtccagccagcttgtagataatgg

SEQ ID NO: 124400 - DNA, 20 bp, Artificial Sequence
  primer
ccatacaggctcccattgag

SEQ ID NO: 124401 - DNA, 37 bp, Artificial Sequence
  primer
gtaaaacgacggccagtgactgggcatacaggattcg

SEQ ID NO: 124402 - DNA, 20 bp, Artificial Sequence
  primer
caagtcccaggaggacaagg

SEQ ID NO: 124403 - DNA, 21 bp, Artificial Sequence
  primer
atccctgctagcatccatctc

SEQ ID NO: 124404 - DNA, 20 bp, Artificial Sequence
  primer
atgccagctgttctctgagc

SEQ ID NO: 124405 - DNA, 37 bp, Artificial Sequence
  primer
gtaaaacgacggccagtcaccagccacaaggtctcac

SEQ ID NO: 124406 - DNA, 35 bp, Artificial Sequence
  primer
gtaaaacgacggccagtcaggaaacgcctgctctg

SEQ ID NO: 124407 - DNA, 39 bp, Artificial Sequence
  primer
gtaaaacgacggccagtaaacatcccttctgcttgacag

SEQ ID NO: 124408 - DNA, 21 bp, Artificial Sequence
  primer
aaatgatcgtgaaccgtaccc

SEQ ID NO: 124409 - DNA, 20 bp, Artificial Sequence
  primer
gggctcaggaagtagaaggg

SEQ ID NO: 124410 - DNA, 38 bp, Artificial Sequence
  primer
gtaaaacgacggccagtacgggcaggatagtcaatcag

SEQ ID NO: 124411 - DNA, 38 bp, Artificial Sequence
  primer
gtaaaacgacggccagtaatcatgacactgacaagccc

SEQ ID NO: 124412 - DNA, 38 bp, Artificial Sequence
  primer
gtaaaacgacggccagtggtggtatgcacctgtagtcc

SEQ ID NO: 124413 - DNA, 27 bp, Artificial Sequence
  primer
aagaggtctacaatcatgtaacacaac

SEQ ID NO: 124414 - DNA, 21 bp, Artificial Sequence
  primer
taacccagggatactgatggc

SEQ ID NO: 124415 - DNA, 38 bp, Artificial Sequence
  primer
gtaaaacgacggccagtaatccaacccagtctctgagg

SEQ ID NO: 124416 - DNA, 21 bp, Artificial Sequence
  primer
ggaactccggaagacacagag

SEQ ID NO: 124417 - DNA, 21 bp, Artificial Sequence
  primer
aggatcgtggagtgtctgacc

SEQ ID NO: 124418 - DNA, 37 bp, Artificial Sequence
  primer
gtaaaacgacggccagtgggaacttctcgacagccac

SEQ ID NO: 124419 - DNA, 21 bp, Artificial Sequence
  primer
atctggaagggacccagtctc

SEQ ID NO: 124420 - DNA, 20 bp, Artificial Sequence
  primer
cagtaggcaggcaaggtctg

SEQ ID NO: 124421 - DNA, 20 bp, Artificial Sequence
  primer
tccctcaccagaattcaacg

SEQ ID NO: 124422 - DNA, 38 bp, Artificial Sequence
  primer
gtaaaacgacggccagttctgtagtcccaagccctgtc

SEQ ID NO: 124423 - DNA, 21 bp, Artificial Sequence
  primer
ggtgtaaatgtccattgtcgg

SEQ ID NO: 124424 - DNA, 21 bp, Artificial Sequence
  primer
aaggaggagggttgtttcctg

SEQ ID NO: 124425 - DNA, 21 bp, Artificial Sequence
  primer
gacatgtgacactcacctggg

SEQ ID NO: 124426 - DNA, 21 bp, Artificial Sequence
  primer
ctgtggccaggattaactgtg

SEQ ID NO: 124427 - DNA, 38 bp, Artificial Sequence
  primer
gtaaaacgacggccagtacaacgcttcatcagcatgag

SEQ ID NO: 124428 - DNA, 21 bp, Artificial Sequence
  primer
ctcagccaccctcctctaatc

SEQ ID NO: 124429 - DNA, 24 bp, Artificial Sequence
  primer
tcaggaaacattggatacactcac

SEQ ID NO: 124430 - DNA, 38 bp, Artificial Sequence
  primer
gtaaaacgacggccagtcacttagaaccctctgccagg

SEQ ID NO: 124431 - DNA, 21 bp, Artificial Sequence
  primer
taggcacaacaatctccctcc

SEQ ID NO: 124432 - DNA, 38 bp, Artificial Sequence
  primer
gtaaaacgacggccagtcatgttcatgctctcccagtc

SEQ ID NO: 124433 - DNA, 21 bp, Artificial Sequence
  primer
tcttgcccatagactcctgtg

SEQ ID NO: 124434 - DNA, 38 bp, Artificial Sequence
  primer
gtaaaacgacggccagttccaccaagatgaaagacacc

SEQ ID NO: 124435 - DNA, 21 bp, Artificial Sequence
  primer
gtggagaggcaggtgtctcag

SEQ ID NO: 124436 - DNA, 44 bp, Artificial Sequence
  primer
gtaaaacgacggccagtaacttgcaactttcagctttagtattg

SEQ ID NO: 124437 - DNA, 40 bp, Artificial Sequence
  primer
gtaaaacgacggccagttctaccctcagctcctaaattgg

SEQ ID NO: 124438 - DNA, 27 bp, Artificial Sequence
  primer
gcttacaaaccagtgtaaagtttcctt

SEQ ID NO: 124439 - DNA, 21 bp, Artificial Sequence
  primer
atccatttggcaacgagaaac

SEQ ID NO: 124440 - DNA, 24 bp, Artificial Sequence
  primer
tgtacttctcccatagttgccaag

SEQ ID NO: 124441 - DNA, 21 bp, Artificial Sequence
  primer
cctgcccatcaacacctacag

SEQ ID NO: 124442 - DNA, 38 bp, Artificial Sequence
  primer
gtaaaacgacggccagtcaccaccctggtatccacttc

SEQ ID NO: 124443 - DNA, 38 bp, Artificial Sequence
  primer
gtaaaacgacggccagttgcttatgccaagcaggaatc

SEQ ID NO: 124444 - DNA, 37 bp, Artificial Sequence
  primer
gtaaaacgacggccagtgggacacctccatacctgtg

SEQ ID NO: 124445 - DNA, 19 bp, Artificial Sequence
  primer
gccgcagaaagtcctcctc

SEQ ID NO: 124446 - DNA, 37 bp, Artificial Sequence
  primer
gtaaaacgacggccagtccaaagttctgaccacaccc

SEQ ID NO: 124447 - DNA, 21 bp, Artificial Sequence
  primer
acaggccagtggttggaatac

SEQ ID NO: 124448 - DNA, 21 bp, Artificial Sequence
  primer
gacagagactccaacgcttcc

SEQ ID NO: 124449 - DNA, 21 bp, Artificial Sequence
  primer
caagagggtgatactcctggc

SEQ ID NO: 124450 - DNA, 20 bp, Artificial Sequence
  primer
caatctgaaggccaaggatg

SEQ ID NO: 124451 - DNA, 38 bp, Artificial Sequence
  primer
gtaaaacgacggccagtcttggtattgacgtgaatggg

SEQ ID NO: 124452 - DNA, 21 bp, Artificial Sequence
  primer
gtggactccaaagccacaaag

SEQ ID NO: 124453 - DNA, 19 bp, Artificial Sequence
  primer
gactccaaagccacgaagg

SEQ ID NO: 124454 - DNA, 38 bp, Artificial Sequence
  primer
gtaaaacgacggccagtaatgccatgtttgttgggaag

SEQ ID NO: 124455 - DNA, 21 bp, Artificial Sequence
  primer
aagccatccctctcacttcac

SEQ ID NO: 124456 - DNA, 22 bp, Artificial Sequence
  primer
gacgccaatatgtacaggacag

SEQ ID NO: 124457 - DNA, 40 bp, Artificial Sequence
  primer
gtaaaacgacggccagttccatacattcggaaacaaacag

SEQ ID NO: 124458 - DNA, 39 bp, Artificial Sequence
  primer
gtaaaacgacggccagttccagtgcttacatcaatcctg

SEQ ID NO: 124459 - DNA, 38 bp, Artificial Sequence
  primer
gtaaaacgacggccagtcttagcacgtgcacaatggac

SEQ ID NO: 124460 - DNA, 38 bp, Artificial Sequence
  primer
gtaaaacgacggccagtagtgatgacatggtccaaagc

SEQ ID NO: 124461 - DNA, 37 bp, Artificial Sequence
  primer
gtaaaacgacggccagtaaagccatccatctcgcttc

SEQ ID NO: 124462 - DNA, 25 bp, Artificial Sequence
  primer
cactagagacgccaatatgtacagg

SEQ ID NO: 124463 - DNA, 22 bp, Artificial Sequence
  primer
ttccttctttgctggatttctg

SEQ ID NO: 124464 - DNA, 43 bp, Artificial Sequence
  primer
gtaaaacgacggccagtaatcaaatgtctttccatacattcag

SEQ ID NO: 124465 - DNA, 21 bp, Artificial Sequence
  primer
gacaactgggtaagtgccaac

SEQ ID NO: 124466 - DNA, 38 bp, Artificial Sequence
  primer
gtaaaacgacggccagttgagagcatctgtaaccctgc

SEQ ID NO: 124467 - DNA, 37 bp, Artificial Sequence
  primer
gtaaaacgacggccagtaggccttgtttgttgggaag

SEQ ID NO: 124468 - DNA, 22 bp, Artificial Sequence
  primer
cccaaacaattaaatttccacg

SEQ ID NO: 124469 - DNA, 25 bp, Artificial Sequence
  primer
ccctagagacaccaatatgtacagg

SEQ ID NO: 124470 - DNA, 21 bp, Artificial Sequence
  primer
gctctcttccttctttgctgg

SEQ ID NO: 124471 - DNA, 44 bp, Artificial Sequence
  primer
gtaaaacgacggccagtttatgttaaatctggaacaacacattc

SEQ ID NO: 124472 - DNA, 19 bp, Artificial Sequence
  primer
gttcgggaaagaagggagc

SEQ ID NO: 124473 - DNA, 38 bp, Artificial Sequence
  primer
gtaaaacgacggccagttttcttaggaaagctgtgcgg

SEQ ID NO: 124474 - DNA, 21 bp, Artificial Sequence
  primer
agaagcccaagagcaagtcac

SEQ ID NO: 124475 - DNA, 24 bp, Artificial Sequence
  primer
tgagcaaactctaacagggaagac

SEQ ID NO: 124476 - DNA, 38 bp, Artificial Sequence
  primer
gtaaaacgacggccagtaaacccaggtactctgttgcc

SEQ ID NO: 124477 - DNA, 38 bp, Artificial Sequence
  primer
gtaaaacgacggccagtatcaaacccgtctgattctgg

SEQ ID NO: 124478 - DNA, 38 bp, Artificial Sequence
  primer
gtaaaacgacggccagtggctgagactgggagtctgtc

SEQ ID NO: 124479 - DNA, 22 bp, Artificial Sequence
  primer
gacggagactctaaacaccctg

SEQ ID NO: 124480 - DNA, 38 bp, Artificial Sequence
  primer
gtaaaacgacggccagttccagtaccaggactctgcac

SEQ ID NO: 124481 - DNA, 21 bp, Artificial Sequence
  primer
ctcctcctcacgcacgttatc

SEQ ID NO: 124482 - DNA, 38 bp, Artificial Sequence
  primer
gtaaaacgacggccagtgaattcctggcatctccagtc

SEQ ID NO: 124483 - DNA, 38 bp, Artificial Sequence
  primer
gtaaaacgacggccagtccagacatccctgaacctctc

SEQ ID NO: 124484 - DNA, 21 bp, Artificial Sequence
  primer
cagtcagtgcttatggaagcg

SEQ ID NO: 124485 - DNA, 21 bp, Artificial Sequence
  primer
catgacagagaatcaggtggg

SEQ ID NO: 124486 - DNA, 38 bp, Artificial Sequence
  primer
gtaaaacgacggccagttgtttcaccataaacggcttg

SEQ ID NO: 124487 - DNA, 20 bp, Artificial Sequence
  primer
gaaactggacctttgcatgg

SEQ ID NO: 124488 - DNA, 21 bp, Artificial Sequence
  primer
gacacacaaggtgggacacag

SEQ ID NO: 124489 - DNA, 21 bp, Artificial Sequence
  primer
aatagacagtggccaacctgc

SEQ ID NO: 124490 - DNA, 21 bp, Artificial Sequence
  primer
actctataaacgccacacggg

SEQ ID NO: 124491 - DNA, 39 bp, Artificial Sequence
  primer
gtaaaacgacggccagtcagaagatccacaattcttcgc

SEQ ID NO: 124492 - DNA, 38 bp, Artificial Sequence
  primer
gtaaaacgacggccagtgagctcactcgggtggtgtag

SEQ ID NO: 124493 - DNA, 23 bp, Artificial Sequence
  primer
ttcagtaggactagccttccacc

SEQ ID NO: 124494 - DNA, 38 bp, Artificial Sequence
  primer
gtaaaacgacggccagtaattgagagaaggctccatgc

SEQ ID NO: 124495 - DNA, 21 bp, Artificial Sequence
  primer
ggaagacaacccatcttctgc

SEQ ID NO: 124496 - DNA, 39 bp, Artificial Sequence
  primer
gtaaaacgacggccagtgacgaattgagaagtagcagcc

SEQ ID NO: 124497 - DNA, 21 bp, Artificial Sequence
  primer
tgggtggtatgtctgcatgtc

SEQ ID NO: 124498 - DNA, 38 bp, Artificial Sequence
  primer
gtaaaacgacggccagtacacaaggaaaggcagcactc

SEQ ID NO: 124499 - DNA, 21 bp, Artificial Sequence
  primer
gtcacctacgtgctgctgttc

SEQ ID NO: 124500 - DNA, 38 bp, Artificial Sequence
  primer
gtaaaacgacggccagttgacctcaaactcctggattc

SEQ ID NO: 124501 - DNA, 21 bp, Artificial Sequence
  primer
gacatttgggtataggctggg

SEQ ID NO: 124502 - DNA, 21 bp, Artificial Sequence
  primer
atctcctgactgtgtgatccg

SEQ ID NO: 124503 - DNA, 21 bp, Artificial Sequence
  primer
atgtgccacagaaatggacag

SEQ ID NO: 124504 - DNA, 21 bp, Artificial Sequence
  primer
attcacacggtcagtacacgc

SEQ ID NO: 124505 - DNA, 39 bp, Artificial Sequence
  primer
gtaaaacgacggccagtgaactcacaggaagctgacagg

SEQ ID NO: 124506 - DNA, 38 bp, Artificial Sequence
  primer
gtaaaacgacggccagtggtaacacccgtgatggagac

SEQ ID NO: 124507 - DNA, 38 bp, Artificial Sequence
  primer
gtaaaacgacggccagtcaagcaagccagggtgtttag

SEQ ID NO: 124508 - DNA, 20 bp, Artificial Sequence
  primer
aaagtcttgctccaagccac

SEQ ID NO: 124509 - DNA, 38 bp, Artificial Sequence
  primer
gtaaaacgacggccagtgaaaccctgacttggaagctg

SEQ ID NO: 124510 - DNA, 21 bp, Artificial Sequence
  primer
aaggagggctcgttcttaacc

SEQ ID NO: 124511 - DNA, 37 bp, Artificial Sequence
  primer
gtaaaacgacggccagtgacccagaggtgctgagatg

SEQ ID NO: 124512 - DNA, 21 bp, Artificial Sequence
  primer
ggaacattctttggcagaagg

SEQ ID NO: 124513 - DNA, 38 bp, Artificial Sequence
  primer
gtaaaacgacggccagtgctgtgagagaggagcaggtc

SEQ ID NO: 124514 - DNA, 38 bp, Artificial Sequence
  primer
gtaaaacgacggccagtcccactaaagcagtcgaggag

SEQ ID NO: 124515 - DNA, 21 bp, Artificial Sequence
  primer
agtgagtgggacaaacattgg

SEQ ID NO: 124516 - DNA, 21 bp, Artificial Sequence
  primer
agaatgctttgacatgcctcc

SEQ ID NO: 124517 - DNA, 41 bp, Artificial Sequence
  primer
gtaaaacgacggccagtgaaggctcttgagtacattcttcc

SEQ ID NO: 124518 - DNA, 38 bp, Artificial Sequence
  primer
gtaaaacgacggccagtaggtttcctccacctgaatcc

SEQ ID NO: 124519 - DNA, 39 bp, Artificial Sequence
  primer
gtaaaacgacggccagtcatttccaaacaactcaaaggc

SEQ ID NO: 124520 - DNA, 24 bp, Artificial Sequence
  primer
catttgttgaaaggagattcaatg

SEQ ID NO: 124521 - DNA, 23 bp, Artificial Sequence
  primer
cccaagcaccaagttgcttatac

SEQ ID NO: 124522 - DNA, 22 bp, Artificial Sequence
  primer
cccaaggttcctgataactgaa

SEQ ID NO: 124523 - DNA, 35 bp, Artificial Sequence
  primer
gtaaaacgacggccagtgatcccaggaggtggagg

SEQ ID NO: 124524 - DNA, 41 bp, Artificial Sequence
  primer
gtaaaacgacggccagttcattaaactctgcccattatcag

SEQ ID NO: 124525 - DNA, 37 bp, Artificial Sequence
  primer
gtaaaacgacggccagtcgctgttgaaccacacattg

SEQ ID NO: 124526 - DNA, 22 bp, Artificial Sequence
  primer
ctgtgcagcaaagtctgatttc

SEQ ID NO: 124527 - DNA, 39 bp, Artificial Sequence
  primer
gtaaaacgacggccagtccctagttgagaaccactgctg

SEQ ID NO: 124528 - DNA, 21 bp, Artificial Sequence
  primer
cagtcaataccacaagtcccg

SEQ ID NO: 124529 - DNA, 20 bp, Artificial Sequence
  primer
cctgaagatctgcatgggtg

SEQ ID NO: 124530 - DNA, 23 bp, Artificial Sequence
  primer
catcatagaactggattccaccc

SEQ ID NO: 124531 - DNA, 43 bp, Artificial Sequence
  primer
gtaaaacgacggccagtaaagttaaacatctcttctggaggac

SEQ ID NO: 124532 - DNA, 23 bp, Artificial Sequence
  primer
tgtagggctttctacctaatggg

SEQ ID NO: 124533 - DNA, 20 bp, Artificial Sequence
  primer
ctttccaacacaccacagcc

SEQ ID NO: 124534 - DNA, 20 bp, Artificial Sequence
  primer
atgctccaaggatgcagaaa

SEQ ID NO: 124535 - DNA, 21 bp, Artificial Sequence
  primer
aaagctcagaggaacaggagg

SEQ ID NO: 124536 - DNA, 38 bp, Artificial Sequence
  primer
gtaaaacgacggccagtaatggcttaacctttgttggg

SEQ ID NO: 124537 - DNA, 37 bp, Artificial Sequence
  primer
gtaaaacgacggccagtccacagaatgtgggatcctg

SEQ ID NO: 124538 - DNA, 38 bp, Artificial Sequence
  primer
gtaaaacgacggccagtctcacctgtttggtgatggtc

SEQ ID NO: 124539 - DNA, 21 bp, Artificial Sequence
  primer
gagctcaggtgtcatggaagc

SEQ ID NO: 124540 - DNA, 21 bp, Artificial Sequence
  primer
gaccatttatctgtgctgggc

SEQ ID NO: 124541 - DNA, 21 bp, Artificial Sequence
  primer
tacagctcattctcacagccc

SEQ ID NO: 124542 - DNA, 21 bp, Artificial Sequence
  primer
gtggagactgaggtccagagg

SEQ ID NO: 124543 - DNA, 20 bp, Artificial Sequence
  primer
atggatggccctctgatttc

SEQ ID NO: 124544 - DNA, 22 bp, Artificial Sequence
  primer
ccaggccactaacaaattcttc

SEQ ID NO: 124545 - DNA, 38 bp, Artificial Sequence
  primer
gtaaaacgacggccagtttgaaacaactgtgctctccc

SEQ ID NO: 124546 - DNA, 38 bp, Artificial Sequence
  primer
gtaaaacgacggccagtcccaaattctccaattaaccc

SEQ ID NO: 124547 - DNA, 21 bp, Artificial Sequence
  primer
ctgcaccaggccaatagttac

SEQ ID NO: 124548 - DNA, 27 bp, Artificial Sequence
  primer
tttctgaaatttaaagggtgaagtatc

SEQ ID NO: 124549 - DNA, 26 bp, Artificial Sequence
  primer
gagaccatattactactgctctttgc

SEQ ID NO: 124550 - DNA, 38 bp, Artificial Sequence
  primer
gtaaaacgacggccagtccaaggcaatgactgactgac

SEQ ID NO: 124551 - DNA, 41 bp, Artificial Sequence
  primer
gtaaaacgacggccagttgaatagctccattctctcctctg

SEQ ID NO: 124552 - DNA, 21 bp, Artificial Sequence
  primer
cgtctgtctgggattgatctg

SEQ ID NO: 124553 - DNA, 37 bp, Artificial Sequence
  primer
gtaaaacgacggccagtaatgtgtccatctggcaacc

SEQ ID NO: 124554 - DNA, 21 bp, Artificial Sequence
  primer
cgccacctcagattatcttcc

SEQ ID NO: 124555 - DNA, 21 bp, Artificial Sequence
  primer
ctcaatgggtttgaacaatgg

SEQ ID NO: 124556 - DNA, 38 bp, Artificial Sequence
  primer
gtaaaacgacggccagtacccaggtcagagttccttcc

SEQ ID NO: 124557 - DNA, 22 bp, Artificial Sequence
  primer
ttcacagcacccagaatagaga

SEQ ID NO: 124558 - DNA, 19 bp, Artificial Sequence
  primer
ctgagatcgtgccaactgc

SEQ ID NO: 124559 - DNA, 38 bp, Artificial Sequence
  primer
gtaaaacgacggccagtcacgattagaagggaacatgg

SEQ ID NO: 124560 - DNA, 21 bp, Artificial Sequence
  primer
tcacttgaacctgagaggtgg

SEQ ID NO: 124561 - DNA, 38 bp, Artificial Sequence
  primer
gtaaaacgacggccagtgaaggagccctcagagaagag

SEQ ID NO: 124562 - DNA, 38 bp, Artificial Sequence
  primer
gtaaaacgacggccagtgttgggaggaaagaagctgtg

SEQ ID NO: 124563 - DNA, 21 bp, Artificial Sequence
  primer
cacgttggccagaaagtaatc

SEQ ID NO: 124564 - DNA, 38 bp, Artificial Sequence
  primer
gtaaaacgacggccagtttgatctgccctttccctaag

SEQ ID NO: 124565 - DNA, 38 bp, Artificial Sequence
  primer
gtaaaacgacggccagtgggagtggtgggacataacag

SEQ ID NO: 124566 - DNA, 39 bp, Artificial Sequence
  primer
gtaaaacgacggccagtggtatcagggaaagctaagtgc

SEQ ID NO: 124567 - DNA, 41 bp, Artificial Sequence
  primer
gtaaaacgacggccagtccaattactgatgccatgatacac

SEQ ID NO: 124568 - DNA, 22 bp, Artificial Sequence
  primer
ggagattactccaacgcctaag

SEQ ID NO: 124569 - DNA, 41 bp, Artificial Sequence
  primer
gtaaaacgacggccagttctctcctcagtgtcacagtgttc

SEQ ID NO: 124570 - DNA, 39 bp, Artificial Sequence
  primer
gtaaaacgacggccagtccaaacacaatgccaaagaaag

SEQ ID NO: 124571 - DNA, 21 bp, Artificial Sequence
  primer
tacaccgtgattctcagcagc

SEQ ID NO: 124572 - DNA, 21 bp, Artificial Sequence
  primer
acatttcagtgccttggtgac

SEQ ID NO: 124573 - DNA, 25 bp, Artificial Sequence
  primer
ttacaactactgaaagacacccagg

SEQ ID NO: 124574 - DNA, 21 bp, Artificial Sequence
  primer
ggcctatccaaggttatgtgg

SEQ ID NO: 124575 - DNA, 22 bp, Artificial Sequence
  primer
ccacatgttccaaattgtgttc

SEQ ID NO: 124576 - DNA, 36 bp, Artificial Sequence
  primer
gtaaaacgacggccagttcaaggtgatcctcctgcc

SEQ ID NO: 124577 - DNA, 21 bp, Artificial Sequence
  primer
gggcaacagaacaagcaagac

SEQ ID NO: 124578 - DNA, 38 bp, Artificial Sequence
  primer
gtaaaacgacggccagtgggacaaaggaagaagacgac

SEQ ID NO: 124579 - DNA, 21 bp, Artificial Sequence
  primer
caatcatccaactagggtggg

SEQ ID NO: 124580 - DNA, 38 bp, Artificial Sequence
  primer
gtaaaacgacggccagtagaaaggtgggtttgatccag

SEQ ID NO: 124581 - DNA, 21 bp, Artificial Sequence
  primer
tttggacagacacagtcccag

SEQ ID NO: 124582 - DNA, 21 bp, Artificial Sequence
  primer
aggtgaccttccttacatgcc

SEQ ID NO: 124583 - DNA, 22 bp, Artificial Sequence
  primer
gccacaactcgagatactcagg

SEQ ID NO: 124584 - DNA, 23 bp, Artificial Sequence
  primer
ggcttatttcacctctgtgtgtg

SEQ ID NO: 124585 - DNA, 20 bp, Artificial Sequence
  primer
gagtcctttctgcgtttccc

SEQ ID NO: 124586 - DNA, 38 bp, Artificial Sequence
  primer
gtaaaacgacggccagtccaccactgctgaaagatcac

SEQ ID NO: 124587 - DNA, 38 bp, Artificial Sequence
  primer
gtaaaacgacggccagtattccctcaaccctaccttcc

SEQ ID NO: 124588 - DNA, 21 bp, Artificial Sequence
  primer
tggaaggcactaccagagaag

SEQ ID NO: 124589 - DNA, 21 bp, Artificial Sequence
  primer
ctccagggcaaagaaagtctg

SEQ ID NO: 124590 - DNA, 38 bp, Artificial Sequence
  primer
gtaaaacgacggccagtgcccagatgtctacaaggctg

SEQ ID NO: 124591 - DNA, 38 bp, Artificial Sequence
  primer
gtaaaacgacggccagtactgaatacccaactcctgcc

SEQ ID NO: 124592 - DNA, 38 bp, Artificial Sequence
  primer
gtaaaacgacggccagtggaggtcacaacctcaagagc

SEQ ID NO: 124593 - DNA, 21 bp, Artificial Sequence
  primer
tgaaggactcagaaacccagg

SEQ ID NO: 124594 - DNA, 39 bp, Artificial Sequence
  primer
gtaaaacgacggccagtcatattcatacacccttgtggc

SEQ ID NO: 124595 - DNA, 38 bp, Artificial Sequence
  primer
gtaaaacgacggccagtctagggctcaagacaaggtgg

SEQ ID NO: 124596 - DNA, 21 bp, Artificial Sequence
  primer
gaagttcgctaatcccggaac

SEQ ID NO: 124597 - DNA, 38 bp, Artificial Sequence
  primer
gtaaaacgacggccagtggaagttgttctgaggcaagc

SEQ ID NO: 124598 - DNA, 38 bp, Artificial Sequence
  primer
gtaaaacgacggccagtggtggcggctagtcactaaag

SEQ ID NO: 124599 - DNA, 38 bp, Artificial Sequence
  primer
gtaaaacgacggccagttgtccagatgctaagaccagg

SEQ ID NO: 124600 - DNA, 21 bp, Artificial Sequence
  primer
atccgtgacactacatgccag

SEQ ID NO: 124601 - DNA, 38 bp, Artificial Sequence
  primer
gtaaaacgacggccagttttggtcaagctcagtccctc

SEQ ID NO: 124602 - DNA, 38 bp, Artificial Sequence
  primer
gtaaaacgacggccagtcttaaacaggactccctgccc

SEQ ID NO: 124603 - DNA, 21 bp, Artificial Sequence
  primer
ttgtttatcctcccatctccc

SEQ ID NO: 124604 - DNA, 39 bp, Artificial Sequence
  primer
gtaaaacgacggccagtgctactgcagctggagagaaag

SEQ ID NO: 124605 - DNA, 21 bp, Artificial Sequence
  primer
catggaactgaatgggacaag

SEQ ID NO: 124606 - DNA, 21 bp, Artificial Sequence
  primer
ggctgcaaccaagtacaacag

SEQ ID NO: 124607 - DNA, 21 bp, Artificial Sequence
  primer
gaactgcatgggacattcaag

SEQ ID NO: 124608 - DNA, 37 bp, Artificial Sequence
  primer
gtaaaacgacggccagtctatgtcctgccactgcctc

SEQ ID NO: 124609 - DNA, 21 bp, Artificial Sequence
  primer
aggctctggtaccatgcagag

SEQ ID NO: 124610 - DNA, 37 bp, Artificial Sequence
  primer
gtaaaacgacggccagtatggagctcaccaactcagg

SEQ ID NO: 124611 - DNA, 21 bp, Artificial Sequence
  primer
tgtgtccacagtccctttctc

SEQ ID NO: 124612 - DNA, 21 bp, Artificial Sequence
  primer
cctcctgtctgagaacaccac

SEQ ID NO: 124613 - DNA, 38 bp, Artificial Sequence
  primer
gtaaaacgacggccagtggtgaaagattggcagaaagc

SEQ ID NO: 124614 - DNA, 21 bp, Artificial Sequence
  primer
actagggcaaatttcacaggc

SEQ ID NO: 124615 - DNA, 21 bp, Artificial Sequence
  primer
taacctcctagcccgtcacag

SEQ ID NO: 124616 - DNA, 36 bp, Artificial Sequence
  primer
gtaaaacgacggccagtatgctgcattggtttggaa

SEQ ID NO: 124617 - DNA, 38 bp, Artificial Sequence
  primer
gtaaaacgacggccagtcaacattgtgcaaagcaggtc

SEQ ID NO: 124618 - DNA, 21 bp, Artificial Sequence
  primer
atgtccctcatgcagttcaag

SEQ ID NO: 124619 - DNA, 24 bp, Artificial Sequence
  primer
tccctctctttaattcacagcaac

SEQ ID NO: 124620 - DNA, 23 bp, Artificial Sequence
  primer
gtggtgaataaattctttgaggc

SEQ ID NO: 124621 - DNA, 38 bp, Artificial Sequence
  primer
gtaaaacgacggccagtccatggatactctgggacaac

SEQ ID NO: 124622 - DNA, 42 bp, Artificial Sequence
  primer
gtaaaacgacggccagtgtctgagtccaactgtcattgttag

SEQ ID NO: 124623 - DNA, 20 bp, Artificial Sequence
  primer
cattattgcggtgaaccgag

SEQ ID NO: 124624 - DNA, 43 bp, Artificial Sequence
  primer
gtaaaacgacggccagtaaacttcattatgcaatactgtctgg

SEQ ID NO: 124625 - DNA, 40 bp, Artificial Sequence
  primer
gtaaaacgacggccagtttgatgcagatcagaagtctgtg

SEQ ID NO: 124626 - DNA, 25 bp, Artificial Sequence
  primer
cttggatacttcagaacatttctcc

SEQ ID NO: 124627 - DNA, 30 bp, Artificial Sequence
  primer
tcatagaatagtgtcatagtacagtttgga

SEQ ID NO: 124628 - DNA, 21 bp, Artificial Sequence
  primer
atcgcatcatcatacctgtcc

SEQ ID NO: 124629 - DNA, 38 bp, Artificial Sequence
  primer
gtaaaacgacggccagtctggtagcaagcctcgatctg

SEQ ID NO: 124630 - DNA, 38 bp, Artificial Sequence
  primer
gtaaaacgacggccagtatgcacatgttgtagcttggg

SEQ ID NO: 124631 - DNA, 40 bp, Artificial Sequence
  primer
gtaaaacgacggccagttgatttgaatggatgacagaaag

SEQ ID NO: 124632 - DNA, 38 bp, Artificial Sequence
  primer
gtaaaacgacggccagtggtatgactcactgcacctgg

SEQ ID NO: 124633 - DNA, 39 bp, Artificial Sequence
  primer
gtaaaacgacggccagtcacatccaaatcctgttagctg

SEQ ID NO: 124634 - DNA, 37 bp, Artificial Sequence
  primer
gtaaaacgacggccagtcactgtgttcggcctcattt

SEQ ID NO: 124635 - DNA, 22 bp, Artificial Sequence
  primer
ttacagaaatgagccactgtgc

SEQ ID NO: 124636 - DNA, 41 bp, Artificial Sequence
  primer
gtaaaacgacggccagtttgtagacatttgcatcaaaggag

SEQ ID NO: 124637 - DNA, 38 bp, Artificial Sequence
  primer
gtaaaacgacggccagttgcacccagccataagtaaag

SEQ ID NO: 124638 - DNA, 21 bp, Artificial Sequence
  primer
agtcaggattccaacccagtt

SEQ ID NO: 124639 - DNA, 40 bp, Artificial Sequence
  primer
gtaaaacgacggccagtacatgttgatattcacctttggg

SEQ ID NO: 124640 - DNA, 24 bp, Artificial Sequence
  primer
tgaataatctcgtacagcctttcc

SEQ ID NO: 124641 - DNA, 26 bp, Artificial Sequence
  primer
cacaattatctcattattcccaaagc

SEQ ID NO: 124642 - DNA, 43 bp, Artificial Sequence
  primer
gtaaaacgacggccagtctgagatcacaaggaactatacagaa

SEQ ID NO: 124643 - DNA, 38 bp, Artificial Sequence
  primer
gtaaaacgacggccagtatgtggcagcaatttcatctg

SEQ ID NO: 124644 - DNA, 24 bp, Artificial Sequence
  primer
aagcaaattctcaagtgcagtacc

SEQ ID NO: 124645 - DNA, 23 bp, Artificial Sequence
  primer
cagtcacagagacttggctcatc

SEQ ID NO: 124646 - DNA, 21 bp, Artificial Sequence
  primer
acgggtgatttgatcttggag

SEQ ID NO: 124647 - DNA, 44 bp, Artificial Sequence
  primer
gtaaaacgacggccagtggtctattgctatctgatgtatgttcc

SEQ ID NO: 124648 - DNA, 25 bp, Artificial Sequence
  primer
tggcaaatgtacataatttggattc

SEQ ID NO: 124649 - DNA, 24 bp, Artificial Sequence
  primer
ggatttatgcagatacattggacc

SEQ ID NO: 124650 - DNA, 39 bp, Artificial Sequence
  primer
gtaaaacgacggccagtcagcagaagcccaaggtataaa

SEQ ID NO: 124651 - DNA, 25 bp, Artificial Sequence
  primer
aacagaagctagaaattccaatcac

SEQ ID NO: 124652 - DNA, 23 bp, Artificial Sequence
  primer
caacactgcaagataaagcatca

SEQ ID NO: 124653 - DNA, 24 bp, Artificial Sequence
  primer
ttgcacgtaccacatttaattacc

SEQ ID NO: 124654 - DNA, 21 bp, Artificial Sequence
  primer
caaatagctctgacagcccag

SEQ ID NO: 124655 - DNA, 38 bp, Artificial Sequence
  primer
gtaaaacgacggccagtaagggtggtgtggtagactgg

SEQ ID NO: 124656 - DNA, 38 bp, Artificial Sequence
  primer
gtaaaacgacggccagtctaagcaccctgtgaattgcc

SEQ ID NO: 124657 - DNA, 21 bp, Artificial Sequence
  primer
aacatactctgcaggtgctgg

SEQ ID NO: 124658 - DNA, 21 bp, Artificial Sequence
  primer
gcagacttgccttcagtttcc

SEQ ID NO: 124659 - DNA, 23 bp, Artificial Sequence
  primer
tcgaataatgtcccttagcttca

SEQ ID NO: 124660 - DNA, 21 bp, Artificial Sequence
  primer
cagacttggcaggatgtagcc

SEQ ID NO: 124661 - DNA, 40 bp, Artificial Sequence
  primer
gtaaaacgacggccagttttaatttgaaacaagcagtggc

SEQ ID NO: 124662 - DNA, 21 bp, Artificial Sequence
  primer
ttacaagttatggcaaggccc

SEQ ID NO: 124663 - DNA, 20 bp, Artificial Sequence
  primer
tttggaggcagtttcaaagc

SEQ ID NO: 124664 - DNA, 21 bp, Artificial Sequence
  primer
catcatatggtacggtttggg

SEQ ID NO: 124665 - DNA, 21 bp, Artificial Sequence
  primer
tgatcaccatctttcctcagc

SEQ ID NO: 124666 - DNA, 21 bp, Artificial Sequence
  primer
taatcaaaggccctgcttctg

SEQ ID NO: 124667 - DNA, 21 bp, Artificial Sequence
  primer
cttatgaacaagccgacaggg

SEQ ID NO: 124668 - DNA, 38 bp, Artificial Sequence
  primer
gtaaaacgacggccagtacacctttgccgaactgaaac

SEQ ID NO: 124669 - DNA, 38 bp, Artificial Sequence
  primer
gtaaaacgacggccagtgacaggcgaatgtaatccagg

SEQ ID NO: 124670 - DNA, 38 bp, Artificial Sequence
  primer
gtaaaacgacggccagtagatgcagaatttcccatccc

SEQ ID NO: 124671 - DNA, 37 bp, Artificial Sequence
  primer
gtaaaacgacggccagtatcccaacccattgaggaag

SEQ ID NO: 124672 - DNA, 39 bp, Artificial Sequence
  primer
gtaaaacgacggccagtgttcaaccacttgtgatcttgc

SEQ ID NO: 124673 - DNA, 21 bp, Artificial Sequence
  primer
ctatggcgcaaatccagtatg

SEQ ID NO: 124674 - DNA, 37 bp, Artificial Sequence
  primer
gtaaaacgacggccagtggaaggcaagttgtgtccag

SEQ ID NO: 124675 - DNA, 21 bp, Artificial Sequence
  primer
aagattattggtgacgagggc

SEQ ID NO: 124676 - DNA, 42 bp, Artificial Sequence
  primer
gtaaaacgacggccagtaaagaggtgggtatcccatataagt

SEQ ID NO: 124677 - DNA, 38 bp, Artificial Sequence
  primer
gtaaaacgacggccagtgcagggaaatttaacaaaggc

SEQ ID NO: 124678 - DNA, 38 bp, Artificial Sequence
  primer
gtaaaacgacggccagttttcagcaatgctacccttca

SEQ ID NO: 124679 - DNA, 38 bp, Artificial Sequence
  primer
gtaaaacgacggccagtccaaacttgttgatcccacct

SEQ ID NO: 124680 - DNA, 39 bp, Artificial Sequence
  primer
gtaaaacgacggccagttcaccgaggtcacgtttatatg

SEQ ID NO: 124681 - DNA, 38 bp, Artificial Sequence
  primer
gtaaaacgacggccagtttgaatgcagtaatcctggct

SEQ ID NO: 124682 - DNA, 41 bp, Artificial Sequence
  primer
gtaaaacgacggccagtgggtacattgcaaatagtcctttg

SEQ ID NO: 124683 - DNA, 39 bp, Artificial Sequence
  primer
gtaaaacgacggccagtcccacttgccacttgtaatttg

SEQ ID NO: 124684 - DNA, 27 bp, Artificial Sequence
  primer
gaagagaaattatcacctactgaaggc

SEQ ID NO: 124685 - DNA, 27 bp, Artificial Sequence
  primer
agaaatgtcctcaattacctctatatg

SEQ ID NO: 124686 - DNA, 41 bp, Artificial Sequence
  primer
gtaaaacgacggccagtcgaattgatcagatagaggtgagg

SEQ ID NO: 124687 - DNA, 21 bp, Artificial Sequence
  primer
gtcctgctttctctagcggag

SEQ ID NO: 124688 - DNA, 38 bp, Artificial Sequence
  primer
gtaaaacgacggccagttagatcgcagaatttgcactg

SEQ ID NO: 124689 - DNA, 40 bp, Artificial Sequence
  primer
gtaaaacgacggccagtcagcatcaataggcactgttacc

SEQ ID NO: 124690 - DNA, 25 bp, Artificial Sequence
  primer
tctacacattcgttagctctcttcc

SEQ ID NO: 124691 - DNA, 22 bp, Artificial Sequence
  primer
tccaaactgactgtttccattg

SEQ ID NO: 124692 - DNA, 21 bp, Artificial Sequence
  primer
tggatgagcctttcctcactc

SEQ ID NO: 124693 - DNA, 38 bp, Artificial Sequence
  primer
gtaaaacgacggccagtgaggttagggaagggaggatg

SEQ ID NO: 124694 - DNA, 39 bp, Artificial Sequence
  primer
gtaaaacgacggccagtaggcataggaggatgcttaatg

SEQ ID NO: 124695 - DNA, 38 bp, Artificial Sequence
  primer
gtaaaacgacggccagtatcctgcagcctctttgtcag

SEQ ID NO: 124696 - DNA, 25 bp, Artificial Sequence
  primer
cttgaacttctgagtcctcatcttt

SEQ ID NO: 124697 - DNA, 21 bp, Artificial Sequence
  primer
gacactggagagctcgaaacc

SEQ ID NO: 124698 - DNA, 22 bp, Artificial Sequence
  primer
tcacaatcatttagactggccc

SEQ ID NO: 124699 - DNA, 21 bp, Artificial Sequence
  primer
tctagtgcttcatgccacagg

SEQ ID NO: 124700 - DNA, 20 bp, Artificial Sequence
  primer
taagcagggctgggaaagag

SEQ ID NO: 124701 - DNA, 21 bp, Artificial Sequence
  primer
cgtaggccttcatacgaacag

SEQ ID NO: 124702 - DNA, 21 bp, Artificial Sequence
  primer
tcacgctttgtgttgttctcc

SEQ ID NO: 124703 - DNA, 21 bp, Artificial Sequence
  primer
ctgggaaacagaaagcctgag

SEQ ID NO: 124704 - DNA, 21 bp, Artificial Sequence
  primer
acagccgtagagttaccgacc

SEQ ID NO: 124705 - DNA, 36 bp, Artificial Sequence
  primer
gtaaaacgacggccagtacctccctgacctgctgtg

SEQ ID NO: 124706 - DNA, 38 bp, Artificial Sequence
  primer
gtaaaacgacggccagttggacttgctgaggatgactg

SEQ ID NO: 124707 - DNA, 38 bp, Artificial Sequence
  primer
gtaaaacgacggccagtagagaacaagaaagcccgctc

SEQ ID NO: 124708 - DNA, 38 bp, Artificial Sequence
  primer
gtaaaacgacggccagttcgggacgcttgttctctaag

SEQ ID NO: 124709 - DNA, 19 bp, Artificial Sequence
  primer
gggacagtggcacaacaac

SEQ ID NO: 124710 - DNA, 21 bp, Artificial Sequence
  primer
tcaactgaagtcagcgaatcc

SEQ ID NO: 124711 - DNA, 21 bp, Artificial Sequence
  primer
gcctttcatctttgttcctgc

SEQ ID NO: 124712 - DNA, 21 bp, Artificial Sequence
  primer
ggttggacaagcttggtgtag

SEQ ID NO: 124713 - DNA, 18 bp, Artificial Sequence
  primer
ctgggctcagtctgggag

SEQ ID NO: 124714 - DNA, 20 bp, Artificial Sequence
  primer
ttccagttgtctcccaggtg

SEQ ID NO: 124715 - DNA, 21 bp, Artificial Sequence
  primer
tctggctgctcttcctctacc

SEQ ID NO: 124716 - DNA, 38 bp, Artificial Sequence
  primer
gtaaaacgacggccagtaaccaagatgccactagccac

SEQ ID NO: 124717 - DNA, 38 bp, Artificial Sequence
  primer
gtaaaacgacggccagtatctggatgtcctcaacccac

SEQ ID NO: 124718 - DNA, 38 bp, Artificial Sequence
  primer
gtaaaacgacggccagttggctttagatgcagaaatgc

SEQ ID NO: 124719 - DNA, 21 bp, Artificial Sequence
  primer
agtgttgatccttccctgctc

SEQ ID NO: 124720 - DNA, 38 bp, Artificial Sequence
  primer
gtaaaacgacggccagtaagaggcctgagtcattccag

SEQ ID NO: 124721 - DNA, 21 bp, Artificial Sequence
  primer
gggagaaatcctgatgtttgg

SEQ ID NO: 124722 - DNA, 21 bp, Artificial Sequence
  primer
tcattcagacgctgagaggtc

SEQ ID NO: 124723 - DNA, 43 bp, Artificial Sequence
  primer
gtaaaacgacggccagttttctcatgtgttaccaaagctactc

SEQ ID NO: 124724 - DNA, 38 bp, Artificial Sequence
  primer
gtaaaacgacggccagtaggcttggattaaaggcagac

SEQ ID NO: 124725 - DNA, 38 bp, Artificial Sequence
  primer
gtaaaacgacggccagtcttgctaaccatacacggtgg

SEQ ID NO: 124726 - DNA, 38 bp, Artificial Sequence
  primer
gtaaaacgacggccagtttcacatgtgtttgtgcaagg

SEQ ID NO: 124727 - DNA, 38 bp, Artificial Sequence
  primer
gtaaaacgacggccagtcacctcattctatggtcaggc

SEQ ID NO: 124728 - DNA, 38 bp, Artificial Sequence
  primer
gtaaaacgacggccagtttgcagaagtcacgacaacag

SEQ ID NO: 124729 - DNA, 37 bp, Artificial Sequence
  primer
gtaaaacgacggccagtaatcgaggcccgtactcatc

SEQ ID NO: 124730 - DNA, 21 bp, Artificial Sequence
  primer
agcctgaacaacatggagaaa

SEQ ID NO: 124731 - DNA, 23 bp, Artificial Sequence
  primer
tcacaatacctccactttgtgtg

SEQ ID NO: 124732 - DNA, 20 bp, Artificial Sequence
  primer
ggtgacggagcaagactcag

SEQ ID NO: 124733 - DNA, 19 bp, Artificial Sequence
  primer
tggactgaagcaaccctcc

SEQ ID NO: 124734 - DNA, 22 bp, Artificial Sequence
  primer
tctaaggcactgaaactctgcc

SEQ ID NO: 124735 - DNA, 36 bp, Artificial Sequence
  primer
gtaaaacgacggccagtaccacccgaaggaacagtg

SEQ ID NO: 124736 - DNA, 18 bp, Artificial Sequence
  primer
ctgagatcatgccaccgc

SEQ ID NO: 124737 - DNA, 21 bp, Artificial Sequence
  primer
ctgggaagttcctaagagcgg

SEQ ID NO: 124738 - DNA, 41 bp, Artificial Sequence
  primer
gtaaaacgacggccagtccctgttctaaggagaccctactc

SEQ ID NO: 124739 - DNA, 21 bp, Artificial Sequence
  primer
agtcttcaggtctggcaaagc

SEQ ID NO: 124740 - DNA, 37 bp, Artificial Sequence
  primer
gtaaaacgacggccagtgtatgagccactgtgcctgg

SEQ ID NO: 124741 - DNA, 21 bp, Artificial Sequence
  primer
cttcttcccactctgtgaccc

SEQ ID NO: 124742 - DNA, 21 bp, Artificial Sequence
  primer
cctctgcaggagagaggtagg

SEQ ID NO: 124743 - DNA, 21 bp, Artificial Sequence
  primer
ttggttgtgtgacttggaagc

SEQ ID NO: 124744 - DNA, 21 bp, Artificial Sequence
  primer
gggattgtgtgggaacttagc

SEQ ID NO: 124745 - DNA, 21 bp, Artificial Sequence
  primer
agtaagaggcagtcctctggg

SEQ ID NO: 124746 - DNA, 21 bp, Artificial Sequence
  primer
cagtttccctgttcacacagc

SEQ ID NO: 124747 - DNA, 22 bp, Artificial Sequence
  primer
caccaccatgagtagaaatggg

SEQ ID NO: 124748 - DNA, 21 bp, Artificial Sequence
  primer
cagtgagaccacagccacttc

SEQ ID NO: 124749 - DNA, 20 bp, Artificial Sequence
  primer
caggctgtcaaagttctgcc

SEQ ID NO: 124750 - DNA, 21 bp, Artificial Sequence
  primer
ctcacctcatgcttggagaag

SEQ ID NO: 124751 - DNA, 38 bp, Artificial Sequence
  primer
gtaaaacgacggccagtatggcgggtcagtattgagag

SEQ ID NO: 124752 - DNA, 18 bp, Artificial Sequence
  primer
gcaagactccgtctcggg

SEQ ID NO: 124753 - DNA, 23 bp, Artificial Sequence
  primer
aatatctacaagtgtgcaacggg

SEQ ID NO: 124754 - DNA, 23 bp, Artificial Sequence
  primer
agtggctttcaagtacatgatcc

SEQ ID NO: 124755 - DNA, 26 bp, Artificial Sequence
  primer
tttcagagacgactgatatcaaagag

SEQ ID NO: 124756 - DNA, 38 bp, Artificial Sequence
  primer
gtaaaacgacggccagtgaacccagggaccaattaacc

SEQ ID NO: 124757 - DNA, 38 bp, Artificial Sequence
  primer
gtaaaacgacggccagtaatttggcttggacgtagagc

SEQ ID NO: 124758 - DNA, 21 bp, Artificial Sequence
  primer
gaatccacttgttggacatgg

SEQ ID NO: 124759 - DNA, 38 bp, Artificial Sequence
  primer
gtaaaacgacggccagtgccaggataaggagtgtgagg

SEQ ID NO: 124760 - DNA, 37 bp, Artificial Sequence
  primer
gtaaaacgacggccagtcaagatgtctccctcccacc

SEQ ID NO: 124761 - DNA, 21 bp, Artificial Sequence
  primer
gccaagaagttgtagggcttg

SEQ ID NO: 124762 - DNA, 21 bp, Artificial Sequence
  primer
agttatcagtcggcatctcgg

SEQ ID NO: 124763 - DNA, 38 bp, Artificial Sequence
  primer
gtaaaacgacggccagttcttccctatgttgcctgagc

SEQ ID NO: 124764 - DNA, 37 bp, Artificial Sequence
  primer
gtaaaacgacggccagtaggagggaaggtgggaagtc

SEQ ID NO: 124765 - DNA, 21 bp, Artificial Sequence
  primer
ccaggtatgggtcagaaggtc

SEQ ID NO: 124766 - DNA, 21 bp, Artificial Sequence
  primer
gtttggaggataatgctggtg

SEQ ID NO: 124767 - DNA, 38 bp, Artificial Sequence
  primer
gtaaaacgacggccagtttctgggtctaggtggtgagc

SEQ ID NO: 124768 - DNA, 21 bp, Artificial Sequence
  primer
cattggatgaatgaatgggtg

SEQ ID NO: 124769 - DNA, 21 bp, Artificial Sequence
  primer
ctacccagtcctctgtccctg

SEQ ID NO: 124770 - DNA, 38 bp, Artificial Sequence
  primer
gtaaaacgacggccagtctgaatgaatgacacggcaag

SEQ ID NO: 124771 - DNA, 21 bp, Artificial Sequence
  primer
atggcccacaaacattatcac

SEQ ID NO: 124772 - DNA, 38 bp, Artificial Sequence
  primer
gtaaaacgacggccagttggctgctgataatgacaagg

SEQ ID NO: 124773 - DNA, 20 bp, Artificial Sequence
  primer
cagtgagccaagactgcacc

SEQ ID NO: 124774 - DNA, 21 bp, Artificial Sequence
  primer
agaaggcagaagtggcaagag

SEQ ID NO: 124775 - DNA, 38 bp, Artificial Sequence
  primer
gtaaaacgacggccagtacatttccctagttgcaaggc

SEQ ID NO: 124776 - DNA, 41 bp, Artificial Sequence
  primer
gtaaaacgacggccagttttgattcagccaagtctattgag

SEQ ID NO: 124777 - DNA, 23 bp, Artificial Sequence
  primer
tttgtcgaattaatgaaagcacc

SEQ ID NO: 124778 - DNA, 37 bp, Artificial Sequence
  primer
gtaaaacgacggccagtcgcacctggcctatctttac

SEQ ID NO: 124779 - DNA, 37 bp, Artificial Sequence
  primer
gtaaaacgacggccagtgcacatagtgtagcgcctgg

SEQ ID NO: 124780 - DNA, 21 bp, Artificial Sequence
  primer
catcctggtcagaagtttggc

SEQ ID NO: 124781 - DNA, 39 bp, Artificial Sequence
  primer
gtaaaacgacggccagtagcatgtccaaatactgcttga

SEQ ID NO: 124782 - DNA, 42 bp, Artificial Sequence
  primer
gtaaaacgacggccagttgaactctcaacactcacatgaaac

SEQ ID NO: 124783 - DNA, 38 bp, Artificial Sequence
  primer
gtaaaacgacggccagtgcagcaaagcacgtaataacc

SEQ ID NO: 124784 - DNA, 21 bp, Artificial Sequence
  primer
ttggtaactgttgaaggtggg

SEQ ID NO: 124785 - DNA, 36 bp, Artificial Sequence
  primer
gtaaaacgacggccagtaaatgctggagggaaaggg

SEQ ID NO: 124786 - DNA, 38 bp, Artificial Sequence
  primer
gtaaaacgacggccagtagcccaaatagatgttccctg

SEQ ID NO: 124787 - DNA, 38 bp, Artificial Sequence
  primer
gtaaaacgacggccagtctgagggaaggtcctaacagc

SEQ ID NO: 124788 - DNA, 23 bp, Artificial Sequence
  primer
ccagtcttctcatttcagaggtg

SEQ ID NO: 124789 - DNA, 38 bp, Artificial Sequence
  primer
gtaaaacgacggccagtacatagcaccacagtaggccc

SEQ ID NO: 124790 - DNA, 21 bp, Artificial Sequence
  primer
aggcaaagcaggactagaacc

SEQ ID NO: 124791 - DNA, 38 bp, Artificial Sequence
  primer
gtaaaacgacggccagttcctgtaggttggaacattgg

SEQ ID NO: 124792 - DNA, 41 bp, Artificial Sequence
  primer
gtaaaacgacggccagtgtaagaatgaggcaaatctttgtg

SEQ ID NO: 124793 - DNA, 21 bp, Artificial Sequence
  primer
acttgagcccaggactttgag

SEQ ID NO: 124794 - DNA, 41 bp, Artificial Sequence
  primer
gtaaaacgacggccagtgctgagcaggtagaattgtatgag

SEQ ID NO: 124795 - DNA, 40 bp, Artificial Sequence
  primer
gtaaaacgacggccagtaaaccaagcagtatttacagcca

SEQ ID NO: 124796 - DNA, 21 bp, Artificial Sequence
  primer
caccattctttcgaacaaagc

SEQ ID NO: 124797 - DNA, 41 bp, Artificial Sequence
  primer
gtaaaacgacggccagtagaatgaggcaaatctttgtgaac

SEQ ID NO: 124798 - DNA, 20 bp, Artificial Sequence
  primer
aggactttgaggctgcagtg

SEQ ID NO: 124799 - DNA, 19 bp, Artificial Sequence
  primer
aagcactttgcaagccagg

SEQ ID NO: 124800 - DNA, 23 bp, Artificial Sequence
  primer
tgtctctttccaaagtcaagtgg

SEQ ID NO: 124801 - DNA, 40 bp, Artificial Sequence
  primer
gtaaaacgacggccagttctagagcctggtaatggaaacc

SEQ ID NO: 124802 - DNA, 38 bp, Artificial Sequence
  primer
gtaaaacgacggccagtgaatacaacattctcggtgcc

SEQ ID NO: 124803 - DNA, 37 bp, Artificial Sequence
  primer
gtaaaacgacggccagtaggctgctgtgaggacaaag

SEQ ID NO: 124804 - DNA, 37 bp, Artificial Sequence
  primer
gtaaaacgacggccagtgtgccagcacctggttctac

SEQ ID NO: 124805 - DNA, 36 bp, Artificial Sequence
  primer
gtaaaacgacggccagtcaccaggctggacacacac

SEQ ID NO: 124806 - DNA, 20 bp, Artificial Sequence
  primer
tgggtagagcagcacctcag

SEQ ID NO: 124807 - DNA, 20 bp, Artificial Sequence
  primer
actggtacaacgagcggatg

SEQ ID NO: 124808 - DNA, 20 bp, Artificial Sequence
  primer
ccatgttggacttggtggag

SEQ ID NO: 124809 - DNA, 38 bp, Artificial Sequence
  primer
gtaaaacgacggccagtctgctcagacctgcagcatag

SEQ ID NO: 124810 - DNA, 19 bp, Artificial Sequence
  primer
ggaccaccagctccagttc

SEQ ID NO: 124811 - DNA, 38 bp, Artificial Sequence
  primer
gtaaaacgacggccagtactcaacactgcagctcctgg

SEQ ID NO: 124812 - DNA, 19 bp, Artificial Sequence
  primer
ggccactctatcctacggg

SEQ ID NO: 124813 - DNA, 38 bp, Artificial Sequence
  primer
gtaaaacgacggccagtacctcaggctcggagaggtag

SEQ ID NO: 124814 - DNA, 21 bp, Artificial Sequence
  primer
ttgttgacattgtactcggcg

SEQ ID NO: 124815 - DNA, 36 bp, Artificial Sequence
  primer
gtaaaacgacggccagtgggctctcttggtgctcag

SEQ ID NO: 124816 - DNA, 37 bp, Artificial Sequence
  primer
gtaaaacgacggccagtgagaagggaggcatgggtag

SEQ ID NO: 124817 - DNA, 21 bp, Artificial Sequence
  primer
ggtagtggtcaggagactcgg

SEQ ID NO: 124818 - DNA, 20 bp, Artificial Sequence
  primer
ctctgacacctcgaaggcac

SEQ ID NO: 124819 - DNA, 38 bp, Artificial Sequence
  primer
gtaaaacgacggccagtcatcccactggtacaccttcc

SEQ ID NO: 124820 - DNA, 20 bp, Artificial Sequence
  primer
aagctgcatgcctagctgtg

SEQ ID NO: 124821 - DNA, 36 bp, Artificial Sequence
  primer
gtaaaacgacggccagtctgctcaccaccacgtcag

SEQ ID NO: 124822 - DNA, 20 bp, Artificial Sequence
  primer
gttgggctagggttgctgac

SEQ ID NO: 124823 - DNA, 20 bp, Artificial Sequence
  primer
tgtgctgtctcctgcaactg

SEQ ID NO: 124824 - DNA, 36 bp, Artificial Sequence
  primer
gtaaaacgacggccagtgagaagaggctctcccacg

SEQ ID NO: 124825 - DNA, 36 bp, Artificial Sequence
  primer
gtaaaacgacggccagtgtcagccaggatgccctac

SEQ ID NO: 124826 - DNA, 37 bp, Artificial Sequence
  primer
gtaaaacgacggccagtgttggagagcagcacacacc

SEQ ID NO: 124827 - DNA, 38 bp, Artificial Sequence
  primer
gtaaaacgacggccagtaggcttgtctagggaaacagg

SEQ ID NO: 124828 - DNA, 38 bp, Artificial Sequence
  primer
gtaaaacgacggccagttccatacctagcaggctgtcc

SEQ ID NO: 124829 - DNA, 18 bp, Artificial Sequence
  primer
atgcagcaggtgggtcag

SEQ ID NO: 124830 - DNA, 37 bp, Artificial Sequence
  primer
gtaaaacgacggccagtatgctgctcgaaggatgtgt

SEQ ID NO: 124831 - DNA, 38 bp, Artificial Sequence
  primer
gtaaaacgacggccagtgacaatcacacccactgcaag

SEQ ID NO: 124832 - DNA, 21 bp, Artificial Sequence
  primer
tggaatgtcacgttcttcagg

SEQ ID NO: 124833 - DNA, 19 bp, Artificial Sequence
  primer
acatcagcttgggtttggc

SEQ ID NO: 124834 - DNA, 19 bp, Artificial Sequence
  primer
ctgcagagaagggctcagg

SEQ ID NO: 124835 - DNA, 19 bp, Artificial Sequence
  primer
ggaggcatcctcagcactc

SEQ ID NO: 124836 - DNA, 37 bp, Artificial Sequence
  primer
gtaaaacgacggccagtcaacaaaccaccttggctcc

SEQ ID NO: 124837 - DNA, 19 bp, Artificial Sequence
  primer
tggtgctcatcgtctccac

SEQ ID NO: 124838 - DNA, 21 bp, Artificial Sequence
  primer
acgactgctatgtcccaagac

SEQ ID NO: 124839 - DNA, 20 bp, Artificial Sequence
  primer
acacggtccagacaacaagg

SEQ ID NO: 124840 - DNA, 20 bp, Artificial Sequence
  primer
aggctgtggatgctgtcaag

SEQ ID NO: 124841 - DNA, 20 bp, Artificial Sequence
  primer
aggaaggagggactgctgag

SEQ ID NO: 124842 - DNA, 20 bp, Artificial Sequence
  primer
ctttaacgctcttcgcgtcc

SEQ ID NO: 124843 - DNA, 21 bp, Artificial Sequence
  primer
gatactttcccgtcgcatacc

SEQ ID NO: 124844 - DNA, 21 bp, Artificial Sequence
  primer
cacctacatctagcagcctcg

SEQ ID NO: 124845 - DNA, 20 bp, Artificial Sequence
  primer
gtctcctcacccgtgaaatg

SEQ ID NO: 124846 - DNA, 20 bp, Artificial Sequence
  primer
ctcttcgcctgttccagaag

SEQ ID NO: 124847 - DNA, 38 bp, Artificial Sequence
  primer
gtaaaacgacggccagttctgtccgtggtcctctactg

SEQ ID NO: 124848 - DNA, 37 bp, Artificial Sequence
  primer
gtaaaacgacggccagtctggctcaattccacctcag

SEQ ID NO: 124849 - DNA, 21 bp, Artificial Sequence
  primer
aagagtgctttgggaaactgc

SEQ ID NO: 124850 - DNA, 38 bp, Artificial Sequence
  primer
gtaaaacgacggccagtgtgtccagcagggagaggtag

SEQ ID NO: 124851 - DNA, 20 bp, Artificial Sequence
  primer
ctccttagctttggcgcttc

SEQ ID NO: 124852 - DNA, 20 bp, Artificial Sequence
  primer
cacagcaggaagtctggagg

SEQ ID NO: 124853 - DNA, 19 bp, Artificial Sequence
  primer
caggagctggtagcccatc

SEQ ID NO: 124854 - DNA, 21 bp, Artificial Sequence
  primer
cagttcctcgaagggtagctg

SEQ ID NO: 124855 - DNA, 18 bp, Artificial Sequence
  primer
atgaatggaagaggcggg

SEQ ID NO: 124856 - DNA, 21 bp, Artificial Sequence
  primer
tgtaccttacttcccacgctg

SEQ ID NO: 124857 - DNA, 39 bp, Artificial Sequence
  primer
gtaaaacgacggccagtgctgtatttcctcctttggtcc

SEQ ID NO: 124858 - DNA, 21 bp, Artificial Sequence
  primer
tgactcttgcgatactggtcc

SEQ ID NO: 124859 - DNA, 38 bp, Artificial Sequence
  primer
gtaaaacgacggccagttgttatcaccggagcacattc

SEQ ID NO: 124860 - DNA, 38 bp, Artificial Sequence
  primer
gtaaaacgacggccagttagccgaaaggatgactgtcc

SEQ ID NO: 124861 - DNA, 21 bp, Artificial Sequence
  primer
gctgtctgggtaaattcaggg

SEQ ID NO: 124862 - DNA, 38 bp, Artificial Sequence
  primer
gtaaaacgacggccagtcgcctagatctctgggaattg

SEQ ID NO: 124863 - DNA, 38 bp, Artificial Sequence
  primer
gtaaaacgacggccagtaatttatttgcctgcaggagc

SEQ ID NO: 124864 - DNA, 38 bp, Artificial Sequence
  primer
gtaaaacgacggccagtactcgggtggattatcattgg

SEQ ID NO: 124865 - DNA, 20 bp, Artificial Sequence
  primer
gttaacaacacccgtcacgc

SEQ ID NO: 124866 - DNA, 38 bp, Artificial Sequence
  primer
gtaaaacgacggccagtactggctttcccttgtctttg

SEQ ID NO: 124867 - DNA, 21 bp, Artificial Sequence
  primer
tgaaccaacaggtgcatcttc

SEQ ID NO: 124868 - DNA, 38 bp, Artificial Sequence
  primer
gtaaaacgacggccagttctataccgagcccaaagagc

SEQ ID NO: 124869 - DNA, 38 bp, Artificial Sequence
  primer
gtaaaacgacggccagtctgtgcccggttatgctaaat

SEQ ID NO: 124870 - DNA, 24 bp, Artificial Sequence
  primer
tgggaatggtattgagggataaag

SEQ ID NO: 124871 - DNA, 39 bp, Artificial Sequence
  primer
gtaaaacgacggccagtcacaaacacttcagccgtttac

SEQ ID NO: 124872 - DNA, 21 bp, Artificial Sequence
  primer
actcatcaaaccgtatgcagg

SEQ ID NO: 124873 - DNA, 38 bp, Artificial Sequence
  primer
gtaaaacgacggccagtagaatccaccgctcatattgc

SEQ ID NO: 124874 - DNA, 22 bp, Artificial Sequence
  primer
cacattatcaatcccattggtg

SEQ ID NO: 124875 - DNA, 44 bp, Artificial Sequence
  primer
gtaaaacgacggccagtgcagatacatagaaatgcttcaatacc

SEQ ID NO: 124876 - DNA, 21 bp, Artificial Sequence
  primer
gtaaacttcggagaggcgttg

SEQ ID NO: 124877 - DNA, 38 bp, Artificial Sequence
  primer
gtaaaacgacggccagtgcaaagtttcaaagtccaggg

SEQ ID NO: 124878 - DNA, 21 bp, Artificial Sequence
  primer
ggaccacgctgttaattgagg

SEQ ID NO: 124879 - DNA, 38 bp, Artificial Sequence
  primer
gtaaaacgacggccagtataatggcttggcaaacacag

SEQ ID NO: 124880 - DNA, 38 bp, Artificial Sequence
  primer
gtaaaacgacggccagttggacagtgagagcaccagtc

SEQ ID NO: 124881 - DNA, 39 bp, Artificial Sequence
  primer
gtaaaacgacggccagtcattgattggattcccaatagc

SEQ ID NO: 124882 - DNA, 38 bp, Artificial Sequence
  primer
gtaaaacgacggccagtacaatgaccttcacgacaacg

SEQ ID NO: 124883 - DNA, 36 bp, Artificial Sequence
  primer
gtaaaacgacggccagtatagcgaatgacatggccc

SEQ ID NO: 124884 - DNA, 21 bp, Artificial Sequence
  primer
aaggtgtcaagctcaaattgc

SEQ ID NO: 124885 - DNA, 21 bp, Artificial Sequence
  primer
acctggatgctctctgcaatc

SEQ ID NO: 124886 - DNA, 37 bp, Artificial Sequence
  primer
gtaaaacgacggccagtctcagcttatatgccgggtg

SEQ ID NO: 124887 - DNA, 21 bp, Artificial Sequence
  primer
ttgctgtgattcccaaacatc

SEQ ID NO: 124888 - DNA, 21 bp, Artificial Sequence
  primer
gtgctcgctaattctggcttc

SEQ ID NO: 124889 - DNA, 21 bp, Artificial Sequence
  primer
ccatcaccagggtatgtaggg

SEQ ID NO: 124890 - DNA, 38 bp, Artificial Sequence
  primer
gtaaaacgacggccagttctgcttcaatggcataggtg

SEQ ID NO: 124891 - DNA, 21 bp, Artificial Sequence
  primer
acttcagtctcccgctctgtc

SEQ ID NO: 124892 - DNA, 38 bp, Artificial Sequence
  primer
gtaaaacgacggccagtacataacttggccgttggttc

SEQ ID NO: 124893 - DNA, 38 bp, Artificial Sequence
  primer
gtaaaacgacggccagtgtgaatcgtggtggactatcg

SEQ ID NO: 124894 - DNA, 20 bp, Artificial Sequence
  primer
ttcagaatcagcatccgtgg

SEQ ID NO: 124895 - DNA, 38 bp, Artificial Sequence
  primer
gtaaaacgacggccagtgcttgaaatgaggctcaacag

SEQ ID NO: 124896 - DNA, 21 bp, Artificial Sequence
  primer
caaatgatggtcccattgaaa

SEQ ID NO: 124897 - DNA, 22 bp, Artificial Sequence
  primer
gagatgtcaacttcggagcatc

SEQ ID NO: 124898 - DNA, 37 bp, Artificial Sequence
  primer
gtaaaacgacggccagtagtggcacaggctgaatctg

SEQ ID NO: 124899 - DNA, 38 bp, Artificial Sequence
  primer
gtaaaacgacggccagtggcaacgtggttaagcaaatc

SEQ ID NO: 124900 - DNA, 24 bp, Artificial Sequence
  primer
aaatatttacaaaggccgctacaa

SEQ ID NO: 124901 - DNA, 38 bp, Artificial Sequence
  primer
gtaaaacgacggccagtatgttgccgtcagttcttgag

SEQ ID NO: 124902 - DNA, 21 bp, Artificial Sequence
  primer
caaagcacggaaaggaaagag

SEQ ID NO: 124903 - DNA, 27 bp, Artificial Sequence
  primer
aaagacagcaattctatgaaagtttgt

SEQ ID NO: 124904 - DNA, 21 bp, Artificial Sequence
  primer
gatatgcactgtgatgtcggc

SEQ ID NO: 124905 - DNA, 21 bp, Artificial Sequence
  primer
tttcctcaatgtcagtcacgg

SEQ ID NO: 124906 - DNA, 37 bp, Artificial Sequence
  primer
gtaaaacgacggccagtggcaccttccctcttcattc

SEQ ID NO: 124907 - DNA, 21 bp, Artificial Sequence
  primer
ggaggagggacaccaactatg

SEQ ID NO: 124908 - DNA, 42 bp, Artificial Sequence
  primer
gtaaaacgacggccagttgtggaattcaaccatttcacttac

SEQ ID NO: 124909 - DNA, 38 bp, Artificial Sequence
  primer
gtaaaacgacggccagtaagatggcaacattacggagc

SEQ ID NO: 124910 - DNA, 36 bp, Artificial Sequence
  primer
gtaaaacgacggccagtctgctcgcttccaacactg

SEQ ID NO: 124911 - DNA, 41 bp, Artificial Sequence
  primer
gtaaaacgacggccagtacattagcaaattaacgtgcagac

SEQ ID NO: 124912 - DNA, 39 bp, Artificial Sequence
  primer
gtaaaacgacggccagtcaaatcactgaaggtctgttgc

SEQ ID NO: 124913 - DNA, 39 bp, Artificial Sequence
  primer
gtaaaacgacggccagttgagtcacttggaatactcggg

SEQ ID NO: 124914 - DNA, 21 bp, Artificial Sequence
  primer
cacaatgctaacccagcaatc

SEQ ID NO: 124915 - DNA, 22 bp, Artificial Sequence
  primer
ggctttaagggtagatagtgcg

SEQ ID NO: 124916 - DNA, 22 bp, Artificial Sequence
  primer
tgaggttcagacatatcgaggg

SEQ ID NO: 124917 - DNA, 38 bp, Artificial Sequence
  primer
gtaaaacgacggccagtaagcactgctgcaaagaacag

SEQ ID NO: 124918 - DNA, 21 bp, Artificial Sequence
  primer
tggatgatgagggtgtagctg

SEQ ID NO: 124919 - DNA, 38 bp, Artificial Sequence
  primer
gtaaaacgacggccagtaggtgacgttaagcttcccag

SEQ ID NO: 124920 - DNA, 38 bp, Artificial Sequence
  primer
gtaaaacgacggccagtcaaactgaactcattgctccg

SEQ ID NO: 124921 - DNA, 21 bp, Artificial Sequence
  primer
ggaagacagtttggaaggtgg

SEQ ID NO: 124922 - DNA, 38 bp, Artificial Sequence
  primer
gtaaaacgacggccagtggagggatgttctcatccaag

SEQ ID NO: 124923 - DNA, 19 bp, Artificial Sequence
  primer
gacacttccttctcccggc

SEQ ID NO: 124924 - DNA, 21 bp, Artificial Sequence
  primer
attcaaagttgtgggtgaggc

SEQ ID NO: 124925 - DNA, 38 bp, Artificial Sequence
  primer
gtaaaacgacggccagtagctctatgtcaaagcagccc

SEQ ID NO: 124926 - DNA, 21 bp, Artificial Sequence
  primer
atggttaactggtacccaccg

SEQ ID NO: 124927 - DNA, 38 bp, Artificial Sequence
  primer
gtaaaacgacggccagtccttcagcctgttgtgttctg

SEQ ID NO: 124928 - DNA, 38 bp, Artificial Sequence
  primer
gtaaaacgacggccagtggctcagattgtacccagctc

SEQ ID NO: 124929 - DNA, 21 bp, Artificial Sequence
  primer
cttcagcccatctacctctgg

SEQ ID NO: 124930 - DNA, 35 bp, Artificial Sequence
  primer
gtaaaacgacggccagtctgatggtgccgatttgg

SEQ ID NO: 124931 - DNA, 38 bp, Artificial Sequence
  primer
gtaaaacgacggccagttatcttcctccctgaacccag

SEQ ID NO: 124932 - DNA, 38 bp, Artificial Sequence
  primer
gtaaaacgacggccagtaccatttcccttatgctggtg

SEQ ID NO: 124933 - DNA, 20 bp, Artificial Sequence
  primer
gagcccgaccttgagaagag

SEQ ID NO: 124934 - DNA, 38 bp, Artificial Sequence
  primer
gtaaaacgacggccagtctctgtagcctcatcccaacc

SEQ ID NO: 124935 - DNA, 21 bp, Artificial Sequence
  primer
catgtctccaagcatgtccac

SEQ ID NO: 124936 - DNA, 21 bp, Artificial Sequence
  primer
gcgaattcatgcctctagtgc

SEQ ID NO: 124937 - DNA, 21 bp, Artificial Sequence
  primer
catggtccaatttcttctggg

SEQ ID NO: 124938 - DNA, 21 bp, Artificial Sequence
  primer
agaggcatgaatcacaaaggg

SEQ ID NO: 124939 - DNA, 38 bp, Artificial Sequence
  primer
gtaaaacgacggccagtgatggataggcccgactattg

SEQ ID NO: 124940 - DNA, 21 bp, Artificial Sequence
  primer
catcctgatcaaactgcaagc

SEQ ID NO: 124941 - DNA, 38 bp, Artificial Sequence
  primer
gtaaaacgacggccagtattgtccctcacttccactgc

SEQ ID NO: 124942 - DNA, 21 bp, Artificial Sequence
  primer
tcctcatcagtggcagatacc

SEQ ID NO: 124943 - DNA, 21 bp, Artificial Sequence
  primer
cagcatcaagggttcttcctc

SEQ ID NO: 124944 - DNA, 21 bp, Artificial Sequence
  primer
cacatgaaagtgttgttgggc

SEQ ID NO: 124945 - DNA, 21 bp, Artificial Sequence
  primer
tgacaaccacaagggtttcac

SEQ ID NO: 124946 - DNA, 21 bp, Artificial Sequence
  primer
ccatcagaagcacctaccctc

SEQ ID NO: 124947 - DNA, 21 bp, Artificial Sequence
  primer
cgatccagtttctgcagagtg

SEQ ID NO: 124948 - DNA, 38 bp, Artificial Sequence
  primer
gtaaaacgacggccagtcaccttgaccacaccagtgac

SEQ ID NO: 124949 - DNA, 38 bp, Artificial Sequence
  primer
gtaaaacgacggccagtcctgtgtctgggtctagggag

SEQ ID NO: 124950 - DNA, 38 bp, Artificial Sequence
  primer
gtaaaacgacggccagtctggcaggtctcacagtcaag

SEQ ID NO: 124951 - DNA, 38 bp, Artificial Sequence
  primer
gtaaaacgacggccagttgctcagaaatgtcagcatcc

SEQ ID NO: 124952 - DNA, 37 bp, Artificial Sequence
  primer
gtaaaacgacggccagtggttaagtgtgcccaaggtc

SEQ ID NO: 124953 - DNA, 21 bp, Artificial Sequence
  primer
tacaatgcttggcacataggg

SEQ ID NO: 124954 - DNA, 38 bp, Artificial Sequence
  primer
gtaaaacgacggccagtccgcccttaccagtcctagag

SEQ ID NO: 124955 - DNA, 20 bp, Artificial Sequence
  primer
cagaaaccctgtacgcgatg

SEQ ID NO: 124956 - DNA, 38 bp, Artificial Sequence
  primer
gtaaaacgacggccagtagggtagatacccacacaggg

SEQ ID NO: 124957 - DNA, 21 bp, Artificial Sequence
  primer
agatagtttggccgagcattg

SEQ ID NO: 124958 - DNA, 21 bp, Artificial Sequence
  primer
tgacagcgattcatcttctgg

SEQ ID NO: 124959 - DNA, 38 bp, Artificial Sequence
  primer
gtaaaacgacggccagtgtggactaatgccactgaggg

SEQ ID NO: 124960 - DNA, 37 bp, Artificial Sequence
  primer
gtaaaacgacggccagtatgacagaagcactggtggg

SEQ ID NO: 124961 - DNA, 38 bp, Artificial Sequence
  primer
gtaaaacgacggccagtggctggccaagtgaatgttag

SEQ ID NO: 124962 - DNA, 38 bp, Artificial Sequence
  primer
gtaaaacgacggccagtacttaccattgcaggagcagc

SEQ ID NO: 124963 - DNA, 38 bp, Artificial Sequence
  primer
gtaaaacgacggccagtgccactagccgtcttatggtg

SEQ ID NO: 124964 - DNA, 21 bp, Artificial Sequence
  primer
gaaatgggcttcctgacattc

SEQ ID NO: 124965 - DNA, 21 bp, Artificial Sequence
  primer
cagttctctgggaccacaagg

SEQ ID NO: 124966 - DNA, 21 bp, Artificial Sequence
  primer
agaaatttggaaccaggaggc

SEQ ID NO: 124967 - DNA, 36 bp, Artificial Sequence
  primer
gtaaaacgacggccagtaggtccctgcagcactctc

SEQ ID NO: 124968 - DNA, 38 bp, Artificial Sequence
  primer
gtaaaacgacggccagtattgtcagagtgggaagggac

SEQ ID NO: 124969 - DNA, 37 bp, Artificial Sequence
  primer
gtaaaacgacggccagtcatcatgtcccatcccaaag

SEQ ID NO: 124970 - DNA, 38 bp, Artificial Sequence
  primer
gtaaaacgacggccagtctgatggccgtgtactcattg

SEQ ID NO: 124971 - DNA, 21 bp, Artificial Sequence
  primer
actctccaccatgtcagagcc

SEQ ID NO: 124972 - DNA, 37 bp, Artificial Sequence
  primer
gtaaaacgacggccagtctctcccagccacactcaac

SEQ ID NO: 124973 - DNA, 21 bp, Artificial Sequence
  primer
gcatgcctaccaaatgttgac

SEQ ID NO: 124974 - DNA, 39 bp, Artificial Sequence
  primer
gtaaaacgacggccagttgttctttggaaaggagcacac

SEQ ID NO: 124975 - DNA, 38 bp, Artificial Sequence
  primer
gtaaaacgacggccagttcattgattaagagcagccga

SEQ ID NO: 124976 - DNA, 24 bp, Artificial Sequence
  primer
acacaagaacagtagatcccacag

SEQ ID NO: 124977 - DNA, 43 bp, Artificial Sequence
  primer
gtaaaacgacggccagtttcctcaacttccaacctatattcac

SEQ ID NO: 124978 - DNA, 21 bp, Artificial Sequence
  primer
cttgtttcccaaagggttcag

SEQ ID NO: 124979 - DNA, 38 bp, Artificial Sequence
  primer
gtaaaacgacggccagtttaacaatgccatagcgaacc

SEQ ID NO: 124980 - DNA, 21 bp, Artificial Sequence
  primer
ccagtagaacaatgctgaccg

SEQ ID NO: 124981 - DNA, 35 bp, Artificial Sequence
  primer
gtaaaacgacggccagtatccatccaccttggcct

SEQ ID NO: 124982 - DNA, 42 bp, Artificial Sequence
  primer
gtaaaacgacggccagtagcaatggataacaagaagaggata

SEQ ID NO: 124983 - DNA, 24 bp, Artificial Sequence
  primer
cacaattagtctagcaagaaaggg

SEQ ID NO: 124984 - DNA, 38 bp, Artificial Sequence
  primer
gtaaaacgacggccagtcagtccacccagaatcatgtg

SEQ ID NO: 124985 - DNA, 39 bp, Artificial Sequence
  primer
gtaaaacgacggccagtaaacacttgtccatttgatccc

SEQ ID NO: 124986 - DNA, 43 bp, Artificial Sequence
  primer
gtaaaacgacggccagtaattaaggaaggtttacctcgatctg

SEQ ID NO: 124987 - DNA, 25 bp, Artificial Sequence
  primer
aactctgattaacttcgtaccaacc

SEQ ID NO: 124988 - DNA, 21 bp, Artificial Sequence
  primer
acccaatgctatggctctcag

SEQ ID NO: 124989 - DNA, 38 bp, Artificial Sequence
  primer
gtaaaacgacggccagtacgcaatcacagcatttgttc

SEQ ID NO: 124990 - DNA, 38 bp, Artificial Sequence
  primer
gtaaaacgacggccagtagctacacctttcctcatcgg

SEQ ID NO: 124991 - DNA, 42 bp, Artificial Sequence
  primer
gtaaaacgacggccagtcttcttattgatctggaaacccttc

SEQ ID NO: 124992 - DNA, 38 bp, Artificial Sequence
  primer
gtaaaacgacggccagttgcagtaacggtgatctgtcc

SEQ ID NO: 124993 - DNA, 21 bp, Artificial Sequence
  primer
atagatgggaagggtttctcg

SEQ ID NO: 124994 - DNA, 21 bp, Artificial Sequence
  primer
gtgctcagaactccagcagtg

SEQ ID NO: 124995 - DNA, 38 bp, Artificial Sequence
  primer
gtaaaacgacggccagtagatcaaacgtgccatctgtg

SEQ ID NO: 124996 - DNA, 38 bp, Artificial Sequence
  primer
gtaaaacgacggccagtcgtagacagctccctccattc

SEQ ID NO: 124997 - DNA, 38 bp, Artificial Sequence
  primer
gtaaaacgacggccagtatctctctcacacgccctacc

SEQ ID NO: 124998 - DNA, 40 bp, Artificial Sequence
  primer
gtaaaacgacggccagtctaatttaacatgatttgcaccc

SEQ ID NO: 124999 - DNA, 27 bp, Artificial Sequence
  primer
ccttatttctaccacttcatttcacac

SEQ ID NO: 125000 - DNA, 21 bp, Artificial Sequence
  primer
aacatatacatgcccacatgc

SEQ ID NO: 125001 - DNA, 38 bp, Artificial Sequence
  primer
gtaaaacgacggccagtcccagcattagtcggaactct

SEQ ID NO: 125002 - DNA, 42 bp, Artificial Sequence
  primer
gtaaaacgacggccagtcatgttaaatgtgtagtcttgccac

SEQ ID NO: 125003 - DNA, 21 bp, Artificial Sequence
  primer
aggacttccagctttgcacac

SEQ ID NO: 125004 - DNA, 38 bp, Artificial Sequence
  primer
gtaaaacgacggccagttcctcacagtcatgtcatccc

SEQ ID NO: 125005 - DNA, 38 bp, Artificial Sequence
  primer
gtaaaacgacggccagtcaaactgcttgctcctaaggg

SEQ ID NO: 125006 - DNA, 21 bp, Artificial Sequence
  primer
gagacagagggttgggagttg

SEQ ID NO: 125007 - DNA, 21 bp, Artificial Sequence
  primer
tgaagaagacctcccatggtc

SEQ ID NO: 125008 - DNA, 38 bp, Artificial Sequence
  primer
gtaaaacgacggccagtcttcatgggcagtgtgttgtc

SEQ ID NO: 125009 - DNA, 38 bp, Artificial Sequence
  primer
gtaaaacgacggccagttttagttgtcccagctttgcc

SEQ ID NO: 125010 - DNA, 38 bp, Artificial Sequence
  primer
gtaaaacgacggccagtaaatgctgcatgccacataac

SEQ ID NO: 125011 - DNA, 21 bp, Artificial Sequence
  primer
agatgtgcaaacacttccgtg

SEQ ID NO: 125012 - DNA, 38 bp, Artificial Sequence
  primer
gtaaaacgacggccagtgagcttcctcctcctcacaag

SEQ ID NO: 125013 - DNA, 38 bp, Artificial Sequence
  primer
gtaaaacgacggccagtgtctctgacagggaggcattc

SEQ ID NO: 125014 - DNA, 38 bp, Artificial Sequence
  primer
gtaaaacgacggccagttttgaggctggacatctatgc

SEQ ID NO: 125015 - DNA, 36 bp, Artificial Sequence
  primer
gtaaaacgacggccagtctgctgggagatgaaaggg

SEQ ID NO: 125016 - DNA, 21 bp, Artificial Sequence
  primer
tacttccagggtagtcagggc

SEQ ID NO: 125017 - DNA, 21 bp, Artificial Sequence
  primer
cagctgtcaggactatgcacc

SEQ ID NO: 125018 - DNA, 21 bp, Artificial Sequence
  primer
gtcttccacacctagcatccc

SEQ ID NO: 125019 - DNA, 21 bp, Artificial Sequence
  primer
acataccaccaacccgagaag

SEQ ID NO: 125020 - DNA, 18 bp, Artificial Sequence
  primer
tgagcggctgcaatttct

SEQ ID NO: 125021 - DNA, 38 bp, Artificial Sequence
  primer
gtaaaacgacggccagtcttcccacaggagactggaac

SEQ ID NO: 125022 - DNA, 21 bp, Artificial Sequence
  primer
agaaagatcctgaatctccgc

SEQ ID NO: 125023 - DNA, 38 bp, Artificial Sequence
  primer
gtaaaacgacggccagttcgacaaatgaagacacctgg

SEQ ID NO: 125024 - DNA, 22 bp, Artificial Sequence
  primer
gggagcagacagtgtggtttac

SEQ ID NO: 125025 - DNA, 38 bp, Artificial Sequence
  primer
gtaaaacgacggccagtaaccctgatattccaggttgg

SEQ ID NO: 125026 - DNA, 37 bp, Artificial Sequence
  primer
gtaaaacgacggccagttgctcatccactccaactcc

SEQ ID NO: 125027 - DNA, 22 bp, Artificial Sequence
  primer
ggctgggattaaactcagatgg

SEQ ID NO: 125028 - DNA, 38 bp, Artificial Sequence
  primer
gtaaaacgacggccagtggcctgtgagaggaagatagg

SEQ ID NO: 125029 - DNA, 21 bp, Artificial Sequence
  primer
caaaggcagctagaaacggag

SEQ ID NO: 125030 - DNA, 21 bp, Artificial Sequence
  primer
cagggttaggaaagcaacagg

SEQ ID NO: 125031 - DNA, 20 bp, Artificial Sequence
  primer
atcagagagagggccaggag

SEQ ID NO: 125032 - DNA, 19 bp, Artificial Sequence
  primer
gaggagatgaggaccggag

SEQ ID NO: 125033 - DNA, 20 bp, Artificial Sequence
  primer
aggtctggcacacactgtcc

SEQ ID NO: 125034 - DNA, 21 bp, Artificial Sequence
  primer
ctcacaaagaaaggtggcctg

SEQ ID NO: 125035 - DNA, 18 bp, Artificial Sequence
  primer
cccacgatcacatgagcc

SEQ ID NO: 125036 - DNA, 21 bp, Artificial Sequence
  primer
gtgcaaaggtgcagtcatagc

SEQ ID NO: 125037 - DNA, 20 bp, Artificial Sequence
  primer
ctccagcgaacacgagaaag

SEQ ID NO: 125038 - DNA, 38 bp, Artificial Sequence
  primer
gtaaaacgacggccagtaagcactttcaccttccatcc

SEQ ID NO: 125039 - DNA, 37 bp, Artificial Sequence
  primer
gtaaaacgacggccagttgctgtccagccctttacac

SEQ ID NO: 125040 - DNA, 38 bp, Artificial Sequence
  primer
gtaaaacgacggccagtgggctgatagaaatggctttg

SEQ ID NO: 125041 - DNA, 38 bp, Artificial Sequence
  primer
gtaaaacgacggccagtaggatcagaccacatcactcg

SEQ ID NO: 125042 - DNA, 21 bp, Artificial Sequence
  primer
atttaacagggaaaccatcgc

SEQ ID NO: 125043 - DNA, 21 bp, Artificial Sequence
  primer
gtcaggtgaagaaatcccagc

SEQ ID NO: 125044 - DNA, 20 bp, Artificial Sequence
  primer
gcctgggtgtaggagaccag

SEQ ID NO: 125045 - DNA, 38 bp, Artificial Sequence
  primer
gtaaaacgacggccagtgtcacagcctgataacccacc

SEQ ID NO: 125046 - DNA, 21 bp, Artificial Sequence
  primer
aacaactcctgtaggccaagc

SEQ ID NO: 125047 - DNA, 21 bp, Artificial Sequence
  primer
tataggcagggagaccgagac

SEQ ID NO: 125048 - DNA, 40 bp, Artificial Sequence
  primer
gtaaaacgacggccagtaagtacagaccacagtcactggc

SEQ ID NO: 125049 - DNA, 37 bp, Artificial Sequence
  primer
gtaaaacgacggccagtacatagagcacggagatgcc

SEQ ID NO: 125050 - DNA, 21 bp, Artificial Sequence
  primer
agctgtcagccaccactacag

SEQ ID NO: 125051 - DNA, 20 bp, Artificial Sequence
  primer
gtcttcgtagtgtcgctcgg

SEQ ID NO: 125052 - DNA, 38 bp, Artificial Sequence
  primer
gtaaaacgacggccagtctgctcagtgacagccatttc

SEQ ID NO: 125053 - DNA, 38 bp, Artificial Sequence
  primer
gtaaaacgacggccagtatcaggcagtgatgtggacag

SEQ ID NO: 125054 - DNA, 39 bp, Artificial Sequence
  primer
gtaaaacgacggccagtaggaaccaggacagggtcttac

SEQ ID NO: 125055 - DNA, 38 bp, Artificial Sequence
  primer
gtaaaacgacggccagtagaagatgcactctcacagcc

SEQ ID NO: 125056 - DNA, 21 bp, Artificial Sequence
  primer
accagtcttggactttccacc

SEQ ID NO: 125057 - DNA, 22 bp, Artificial Sequence
  primer
aaggacagcctaacttcttggg

SEQ ID NO: 125058 - DNA, 38 bp, Artificial Sequence
  primer
gtaaaacgacggccagtctcaagccacaggtgatgatg

SEQ ID NO: 125059 - DNA, 22 bp, Artificial Sequence
  primer
ggtaacaggaagtgaaggaccc

SEQ ID NO: 125060 - DNA, 21 bp, Artificial Sequence
  primer
atacccagcaccagacagctc

SEQ ID NO: 125061 - DNA, 38 bp, Artificial Sequence
  primer
gtaaaacgacggccagtgctcatcatagcagccaagac

SEQ ID NO: 125062 - DNA, 38 bp, Artificial Sequence
  primer
gtaaaacgacggccagtcagcaggaaacccaactaagg

SEQ ID NO: 125063 - DNA, 38 bp, Artificial Sequence
  primer
gtaaaacgacggccagtgacatgcccattcacaggtag

SEQ ID NO: 125064 - DNA, 19 bp, Artificial Sequence
  primer
agggtaccttgaggcctgg

SEQ ID NO: 125065 - DNA, 36 bp, Artificial Sequence
  primer
gtaaaacgacggccagtaggtggagtgcacagaggg

SEQ ID NO: 125066 - DNA, 21 bp, Artificial Sequence
  primer
tgtaagggtgaagggtcacag

SEQ ID NO: 125067 - DNA, 20 bp, Artificial Sequence
  primer
aggtcacacagccaggaaac

SEQ ID NO: 125068 - DNA, 38 bp, Artificial Sequence
  primer
gtaaaacgacggccagtggccatcctgcatttattcac

SEQ ID NO: 125069 - DNA, 21 bp, Artificial Sequence
  primer
gacgagagggaggtgatcaag

SEQ ID NO: 125070 - DNA, 21 bp, Artificial Sequence
  primer
caatagtgacccagtccctcc

SEQ ID NO: 125071 - DNA, 38 bp, Artificial Sequence
  primer
gtaaaacgacggccagttttccaatatcctgacaccgc

SEQ ID NO: 125072 - DNA, 21 bp, Artificial Sequence
  primer
aactgtaaagccactcccacc

SEQ ID NO: 125073 - DNA, 37 bp, Artificial Sequence
  primer
gtaaaacgacggccagtatgggcatggctaatcattg

SEQ ID NO: 125074 - DNA, 38 bp, Artificial Sequence
  primer
gtaaaacgacggccagttggcaactaacaacccatttg

SEQ ID NO: 125075 - DNA, 21 bp, Artificial Sequence
  primer
agcttactaccctcaggcagc

SEQ ID NO: 125076 - DNA, 21 bp, Artificial Sequence
  primer
acaaacataagctgccaggtg

SEQ ID NO: 125077 - DNA, 22 bp, Artificial Sequence
  primer
gaaacacctatgaaggaagccc

SEQ ID NO: 125078 - DNA, 21 bp, Artificial Sequence
  primer
actatgagagccaccagcacc

SEQ ID NO: 125079 - DNA, 21 bp, Artificial Sequence
  primer
tctctttcacaccacacctcc

SEQ ID NO: 125080 - DNA, 37 bp, Artificial Sequence
  primer
gtaaaacgacggccagtgcttgcatacagcacgttcc

SEQ ID NO: 125081 - DNA, 21 bp, Artificial Sequence
  primer
aaatgcctaacgtctgtgtcg

SEQ ID NO: 125082 - DNA, 21 bp, Artificial Sequence
  primer
tttgtttcccgttgatgtgtg

SEQ ID NO: 125083 - DNA, 38 bp, Artificial Sequence
  primer
gtaaaacgacggccagtatgcaccagacaaagtccagg

SEQ ID NO: 125084 - DNA, 22 bp, Artificial Sequence
  primer
cgaactacaaagcccatcattg

SEQ ID NO: 125085 - DNA, 21 bp, Artificial Sequence
  primer
tcactgggctccttctttctg

SEQ ID NO: 125086 - DNA, 37 bp, Artificial Sequence
  primer
gtaaaacgacggccagttcaagctcagctccttcacc

SEQ ID NO: 125087 - DNA, 21 bp, Artificial Sequence
  primer
ccaacagattcccttctctgg

SEQ ID NO: 125088 - DNA, 21 bp, Artificial Sequence
  primer
aggaaagtgtgcaagagcagg

SEQ ID NO: 125089 - DNA, 20 bp, Artificial Sequence
  primer
acagggagagtcatcctgcc

SEQ ID NO: 125090 - DNA, 38 bp, Artificial Sequence
  primer
gtaaaacgacggccagtaaggccacattctaaggctcc

SEQ ID NO: 125091 - DNA, 21 bp, Artificial Sequence
  primer
attgcaggaaagaggaaagcc

SEQ ID NO: 125092 - DNA, 40 bp, Artificial Sequence
  primer
gtaaaacgacggccagtaacctgtaaccaatcaaggttcc

SEQ ID NO: 125093 - DNA, 38 bp, Artificial Sequence
  primer
gtaaaacgacggccagtagtagccatgcagacccaatg

SEQ ID NO: 125094 - DNA, 21 bp, Artificial Sequence
  primer
gcagtcagcgaaattgtgaag

SEQ ID NO: 125095 - DNA, 39 bp, Artificial Sequence
  primer
gtaaaacgacggccagtcacattcacagggatgacaaag

SEQ ID NO: 125096 - DNA, 37 bp, Artificial Sequence
  primer
gtaaaacgacggccagtaccacaaggtgcctctgttc

SEQ ID NO: 125097 - DNA, 38 bp, Artificial Sequence
  primer
gtaaaacgacggccagtgaaatttccctggacgtcatc

SEQ ID NO: 125098 - DNA, 20 bp, Artificial Sequence
  primer
ggagaataggaagcctcccg

SEQ ID NO: 125099 - DNA, 18 bp, Artificial Sequence
  primer
cctcccaacacctggatg

SEQ ID NO: 125100 - DNA, 22 bp, Artificial Sequence
  primer
cggcatgggttatttaaactcc

SEQ ID NO: 125101 - DNA, 21 bp, Artificial Sequence
  primer
ccagggatctttaaatggcaa

SEQ ID NO: 125102 - DNA, 21 bp, Artificial Sequence
  primer
ggatggctggatttaagaagg

SEQ ID NO: 125103 - DNA, 22 bp, Artificial Sequence
  primer
gagaactgaccctgttggtttg

SEQ ID NO: 125104 - DNA, 38 bp, Artificial Sequence
  primer
gtaaaacgacggccagttccctgtgaattccacaaatg

SEQ ID NO: 125105 - DNA, 21 bp, Artificial Sequence
  primer
cactgaaggcttctgagcatc

SEQ ID NO: 125106 - DNA, 38 bp, Artificial Sequence
  primer
gtaaaacgacggccagtccatttgcccagtcctctaag

SEQ ID NO: 125107 - DNA, 24 bp, Artificial Sequence
  primer
cacagaatttcaactaaactggca

SEQ ID NO: 125108 - DNA, 20 bp, Artificial Sequence
  primer
atggtttctgcagaggaggg

SEQ ID NO: 125109 - DNA, 45 bp, Artificial Sequence
  primer
gtaaaacgacggccagtcctagataaatgaaatactaggcttccc

SEQ ID NO: 125110 - DNA, 20 bp, Artificial Sequence
  primer
cctgtcctttggacatagcg

SEQ ID NO: 125111 - DNA, 42 bp, Artificial Sequence
  primer
gtaaaacgacggccagttgtctgtacctgaagctaagtgctc

SEQ ID NO: 125112 - DNA, 22 bp, Artificial Sequence
  primer
ccatgctgggatgatcaagtag

SEQ ID NO: 125113 - DNA, 21 bp, Artificial Sequence
  primer
aggacagccttaattcttgcg

SEQ ID NO: 125114 - DNA, 38 bp, Artificial Sequence
  primer
gtaaaacgacggccagtggaagaacctggaacataggc

SEQ ID NO: 125115 - DNA, 38 bp, Artificial Sequence
  primer
gtaaaacgacggccagtcattcattgatgtctgtcggg

SEQ ID NO: 125116 - DNA, 21 bp, Artificial Sequence
  primer
gagatccaaagatcgtgagcc

SEQ ID NO: 125117 - DNA, 21 bp, Artificial Sequence
  primer
aaagcctgggccctaaactac

SEQ ID NO: 125118 - DNA, 21 bp, Artificial Sequence
  primer
tggccagtcagtcctcataac

SEQ ID NO: 125119 - DNA, 41 bp, Artificial Sequence
  primer
gtaaaacgacggccagttggatccaatataaacgatgacaa

SEQ ID NO: 125120 - DNA, 37 bp, Artificial Sequence
  primer
gtaaaacgacggccagtccattggaacattcgtccag

SEQ ID NO: 125121 - DNA, 21 bp, Artificial Sequence
  primer
ttgctagcctgagaaatgtgg

SEQ ID NO: 125122 - DNA, 21 bp, Artificial Sequence
  primer
agaaatggtcagctggaaacc

SEQ ID NO: 125123 - DNA, 37 bp, Artificial Sequence
  primer
gtaaaacgacggccagtgtgacggcccttgtgtagtc

SEQ ID NO: 125124 - DNA, 22 bp, Artificial Sequence
  primer
tgcaaactttgagaatggaatg

SEQ ID NO: 125125 - DNA, 21 bp, Artificial Sequence
  primer
tctacagggctgagaggactg

SEQ ID NO: 125126 - DNA, 22 bp, Artificial Sequence
  primer
gctcctggcactcatcaatatc

SEQ ID NO: 125127 - DNA, 38 bp, Artificial Sequence
  primer
gtaaaacgacggccagttaaatgaggctatggtccagc

SEQ ID NO: 125128 - DNA, 19 bp, Artificial Sequence
  primer
gggatgccagcactcagtc

SEQ ID NO: 125129 - DNA, 38 bp, Artificial Sequence
  primer
gtaaaacgacggccagtaacaatgcacactttgcttcc

SEQ ID NO: 125130 - DNA, 21 bp, Artificial Sequence
  primer
acagggtgtttgcacagtttg

SEQ ID NO: 125131 - DNA, 38 bp, Artificial Sequence
  primer
gtaaaacgacggccagtttcaatgttgtgaaattcgcc

SEQ ID NO: 125132 - DNA, 19 bp, Artificial Sequence
  primer
gtgagtgtttgcaggcagg

SEQ ID NO: 125133 - DNA, 24 bp, Artificial Sequence
  primer
ggatatcactgctgcatatctgtc

SEQ ID NO: 125134 - DNA, 22 bp, Artificial Sequence
  primer
tctcagaatgtatccctcacgg

SEQ ID NO: 125135 - DNA, 41 bp, Artificial Sequence
  primer
gtaaaacgacggccagtcaggtttccagaaagaagcattag

SEQ ID NO: 125136 - DNA, 39 bp, Artificial Sequence
  primer
gtaaaacgacggccagtcatgtcatacctatgcccttgc

SEQ ID NO: 125137 - DNA, 38 bp, Artificial Sequence
  primer
gtaaaacgacggccagtaacagagctttgccatgtttg

SEQ ID NO: 125138 - DNA, 21 bp, Artificial Sequence
  primer
ctccttgggcatctgtgattc

SEQ ID NO: 125139 - DNA, 21 bp, Artificial Sequence
  primer
gacatcgggttctttgcattc

SEQ ID NO: 125140 - DNA, 41 bp, Artificial Sequence
  primer
gtaaaacgacggccagtaaacttatttcagtgccatcttgg

SEQ ID NO: 125141 - DNA, 20 bp, Artificial Sequence
  primer
gaagaatgatcaaatggccc

SEQ ID NO: 125142 - DNA, 38 bp, Artificial Sequence
  primer
gtaaaacgacggccagtagggaagctttgagggacatc

SEQ ID NO: 125143 - DNA, 37 bp, Artificial Sequence
  primer
gtaaaacgacggccagtctcagagcccaggttccttc

SEQ ID NO: 125144 - DNA, 22 bp, Artificial Sequence
  primer
caatcacagtcattacggcatc

SEQ ID NO: 125145 - DNA, 21 bp, Artificial Sequence
  primer
tgtgcaattcaacctaggcac

SEQ ID NO: 125146 - DNA, 21 bp, Artificial Sequence
  primer
tttccacagggtctaacgaag

SEQ ID NO: 125147 - DNA, 21 bp, Artificial Sequence
  primer
cctgtagagcaggtctttcgg

SEQ ID NO: 125148 - DNA, 21 bp, Artificial Sequence
  primer
ataaggccaacaacgcttcac

SEQ ID NO: 125149 - DNA, 21 bp, Artificial Sequence
  primer
atgatgaaggtgccaatagcc

SEQ ID NO: 125150 - DNA, 38 bp, Artificial Sequence
  primer
gtaaaacgacggccagtagcttcagaaagcaagcagtg

SEQ ID NO: 125151 - DNA, 38 bp, Artificial Sequence
  primer
gtaaaacgacggccagtgaaatccagatgcttccttcc

SEQ ID NO: 125152 - DNA, 21 bp, Artificial Sequence
  primer
ggaggaaaccacaggaatctg

SEQ ID NO: 125153 - DNA, 21 bp, Artificial Sequence
  primer
atcacccagttcaccactgag

SEQ ID NO: 125154 - DNA, 38 bp, Artificial Sequence
  primer
gtaaaacgacggccagtgtcacctgtaccttgctttgg

SEQ ID NO: 125155 - DNA, 37 bp, Artificial Sequence
  primer
gtaaaacgacggccagtctaaagggtctgggacggag

SEQ ID NO: 125156 - DNA, 21 bp, Artificial Sequence
  primer
cccgattatcagtgcaatgtg

SEQ ID NO: 125157 - DNA, 39 bp, Artificial Sequence
  primer
gtaaaacgacggccagtggcacatagaaggacctttagc

SEQ ID NO: 125158 - DNA, 27 bp, Artificial Sequence
  primer
actattcaagaacatcactgctctaaa

SEQ ID NO: 125159 - DNA, 22 bp, Artificial Sequence
  primer
gaatttgccatcagtcactcac

SEQ ID NO: 125160 - DNA, 21 bp, Artificial Sequence
  primer
accatccagtgccagattctc

SEQ ID NO: 125161 - DNA, 38 bp, Artificial Sequence
  primer
gtaaaacgacggccagttcaaatcaaacccactaaggc

SEQ ID NO: 125162 - DNA, 38 bp, Artificial Sequence
  primer
gtaaaacgacggccagttcttcatacctgtttgggctg

SEQ ID NO: 125163 - DNA, 21 bp, Artificial Sequence
  primer
ttctggactcaagcaatccac

SEQ ID NO: 125164 - DNA, 22 bp, Artificial Sequence
  primer
tgcaagtgtgttcatacaaccc

SEQ ID NO: 125165 - DNA, 25 bp, Artificial Sequence
  primer
tcatattcattccaatttgatcctg

SEQ ID NO: 125166 - DNA, 20 bp, Artificial Sequence
  primer
cagataccatgttgcctggg

SEQ ID NO: 125167 - DNA, 39 bp, Artificial Sequence
  primer
gtaaaacgacggccagtcatacgtggtgtgtgagctttc

SEQ ID NO: 125168 - DNA, 40 bp, Artificial Sequence
  primer
gtaaaacgacggccagtgacacctgccttagtgaattagc

SEQ ID NO: 125169 - DNA, 19 bp, Artificial Sequence
  primer
aacggacttgccgattctg

SEQ ID NO: 125170 - DNA, 42 bp, Artificial Sequence
  primer
gtaaaacgacggccagttcaatacaggattggatttctcttc

SEQ ID NO: 125171 - DNA, 27 bp, Artificial Sequence
  primer
catctagcttataaccactgctctagg

SEQ ID NO: 125172 - DNA, 39 bp, Artificial Sequence
  primer
gtaaaacgacggccagtacgaattggtaccaccaagaag

SEQ ID NO: 125173 - DNA, 22 bp, Artificial Sequence
  primer
tgtttgttccaaatgtgtgttg

SEQ ID NO: 125174 - DNA, 23 bp, Artificial Sequence
  primer
tttatccgtagtaaggcctgaga

SEQ ID NO: 125175 - DNA, 38 bp, Artificial Sequence
  primer
gtaaaacgacggccagttgcgtagtgaaagaggtgtcc

SEQ ID NO: 125176 - DNA, 39 bp, Artificial Sequence
  primer
gtaaaacgacggccagtggagaaacgggaaactctaagc

SEQ ID NO: 125177 - DNA, 39 bp, Artificial Sequence
  primer
gtaaaacgacggccagtcatgaaacagaaacaatttcgc

SEQ ID NO: 125178 - DNA, 21 bp, Artificial Sequence
  primer
ttgggacagaacattggtcac

SEQ ID NO: 125179 - DNA, 21 bp, Artificial Sequence
  primer
gggcagtcctttcaaacagag

SEQ ID NO: 125180 - DNA, 21 bp, Artificial Sequence
  primer
cagcccagagataagcaaagg

SEQ ID NO: 125181 - DNA, 21 bp, Artificial Sequence
  primer
tgcatccagatgtagggaatc

SEQ ID NO: 125182 - DNA, 22 bp, Artificial Sequence
  primer
ggcagcattccatgtttaagtg

SEQ ID NO: 125183 - DNA, 23 bp, Artificial Sequence
  primer
ttccacttggtaatatctggagc

SEQ ID NO: 125184 - DNA, 19 bp, Artificial Sequence
  primer
acgcttgtgtgtgcatgtg

SEQ ID NO: 125185 - DNA, 21 bp, Artificial Sequence
  primer
aaccgctctaagagatgccag

SEQ ID NO: 125186 - DNA, 21 bp, Artificial Sequence
  primer
taaaggacacccttaggcagg

SEQ ID NO: 125187 - DNA, 22 bp, Artificial Sequence
  primer
catgattgttacaaatgccgtt

SEQ ID NO: 125188 - DNA, 38 bp, Artificial Sequence
  primer
gtaaaacgacggccagtaagccgccatcatcattattc

SEQ ID NO: 125189 - DNA, 40 bp, Artificial Sequence
  primer
gtaaaacgacggccagtagctaagcagaaatctcaggaat

SEQ ID NO: 125190 - DNA, 21 bp, Artificial Sequence
  primer
caagtccgtgagaggaggaag

SEQ ID NO: 125191 - DNA, 20 bp, Artificial Sequence
  primer
actcctcactcccagctcag

SEQ ID NO: 125192 - DNA, 23 bp, Artificial Sequence
  primer
gcagaacagtcagacgtcaaatc

SEQ ID NO: 125193 - DNA, 21 bp, Artificial Sequence
  primer
ttgtagaatgtgaggatgggc

SEQ ID NO: 125194 - DNA, 41 bp, Artificial Sequence
  primer
gtaaaacgacggccagtcttccaaacaataattctgagacg

SEQ ID NO: 125195 - DNA, 21 bp, Artificial Sequence
  primer
gaaccatatgatgctcttggg

SEQ ID NO: 125196 - DNA, 21 bp, Artificial Sequence
  primer
caccagactacgctgatggag

SEQ ID NO: 125197 - DNA, 21 bp, Artificial Sequence
  primer
atcaccattgctgcactcatc

SEQ ID NO: 125198 - DNA, 23 bp, Artificial Sequence
  primer
caggacttcaaagtatccaaccc

SEQ ID NO: 125199 - DNA, 38 bp, Artificial Sequence
  primer
gtaaaacgacggccagtatggcacttgatggaactgtg

SEQ ID NO: 125200 - DNA, 22 bp, Artificial Sequence
  primer
ggccaatactatggtttcagtt

SEQ ID NO: 125201 - DNA, 38 bp, Artificial Sequence
  primer
gtaaaacgacggccagtgaaaggagggaggcacatatc

SEQ ID NO: 125202 - DNA, 38 bp, Artificial Sequence
  primer
gtaaaacgacggccagtcttgcagtggttggcacttag

SEQ ID NO: 125203 - DNA, 26 bp, Artificial Sequence
  primer
aaacagtggcaataattcaaagtacc

SEQ ID NO: 125204 - DNA, 38 bp, Artificial Sequence
  primer
gtaaaacgacggccagtcatggttaaacccactctggc

SEQ ID NO: 125205 - DNA, 26 bp, Artificial Sequence
  primer
tgccagtactgtgtatgtctattcaa

SEQ ID NO: 125206 - DNA, 21 bp, Artificial Sequence
  primer
tggtgaagaaggtgccactac

SEQ ID NO: 125207 - DNA, 21 bp, Artificial Sequence
  primer
agacaagggctttacagcagc

SEQ ID NO: 125208 - DNA, 21 bp, Artificial Sequence
  primer
tagtgggcttctcaacccatc

SEQ ID NO: 125209 - DNA, 39 bp, Artificial Sequence
  primer
gtaaaacgacggccagtttggcttgcagttaagatgatg

SEQ ID NO: 125210 - DNA, 26 bp, Artificial Sequence
  primer
agcagacaagaatatatatgtggagc

SEQ ID NO: 125211 - DNA, 23 bp, Artificial Sequence
  primer
cccttaggtctgatacgaagatt

SEQ ID NO: 125212 - DNA, 21 bp, Artificial Sequence
  primer
gcacattattgagaggatggc

SEQ ID NO: 125213 - DNA, 22 bp, Artificial Sequence
  primer
ttaatgaaggtgatgcacatgg

SEQ ID NO: 125214 - DNA, 22 bp, Artificial Sequence
  primer
tgaaatatggctactgtgcagg

SEQ ID NO: 125215 - DNA, 26 bp, Artificial Sequence
  primer
tttcagattataccaatttgtcttgg

SEQ ID NO: 125216 - DNA, 40 bp, Artificial Sequence
  primer
gtaaaacgacggccagttcaaccctcacaatttgttcatc

SEQ ID NO: 125217 - DNA, 23 bp, Artificial Sequence
  primer
cttggtatttatctgcatacccg

SEQ ID NO: 125218 - DNA, 20 bp, Artificial Sequence
  primer
aaacgacgtgaactgcactg

SEQ ID NO: 125219 - DNA, 21 bp, Artificial Sequence
  primer
atttccagtgtgtatgtgccg

SEQ ID NO: 125220 - DNA, 21 bp, Artificial Sequence
  primer
gctcaaatctttggccatacc

SEQ ID NO: 125221 - DNA, 21 bp, Artificial Sequence
  primer
actcacgtacgacacactggc

SEQ ID NO: 125222 - DNA, 21 bp, Artificial Sequence
  primer
caaggaggttgtagggcaaag

SEQ ID NO: 125223 - DNA, 38 bp, Artificial Sequence
  primer
gtaaaacgacggccagttaggaaggctgcaggactagg

SEQ ID NO: 125224 - DNA, 22 bp, Artificial Sequence
  primer
aatctccagtccaggaagaagg

SEQ ID NO: 125225 - DNA, 38 bp, Artificial Sequence
  primer
gtaaaacgacggccagttctcagggacttccaggaaac

SEQ ID NO: 125226 - DNA, 21 bp, Artificial Sequence
  primer
tccacatctgcaaggacaaag

SEQ ID NO: 125227 - DNA, 21 bp, Artificial Sequence
  primer
gacaaggtcagaactgggcac

SEQ ID NO: 125228 - DNA, 21 bp, Artificial Sequence
  primer
attcatctgcaaggaagcagg

SEQ ID NO: 125229 - DNA, 21 bp, Artificial Sequence
  primer
ctctctctgaggcctggacac

SEQ ID NO: 125230 - DNA, 21 bp, Artificial Sequence
  primer
gctggtgcattcgtctacatc

SEQ ID NO: 125231 - DNA, 38 bp, Artificial Sequence
  primer
gtaaaacgacggccagtactgacaatgcactcgtccac

SEQ ID NO: 125232 - DNA, 21 bp, Artificial Sequence
  primer
agaagagtctcaggtgggctg

SEQ ID NO: 125233 - DNA, 38 bp, Artificial Sequence
  primer
gtaaaacgacggccagttctccttctctcatgctcgtc

SEQ ID NO: 125234 - DNA, 35 bp, Artificial Sequence
  primer
gtaaaacgacggccagtcaccagaagcgagaaccg

SEQ ID NO: 125235 - DNA, 20 bp, Artificial Sequence
  primer
ctcaaagcctccaagggaac

SEQ ID NO: 125236 - DNA, 21 bp, Artificial Sequence
  primer
ctgtagctgccagggctattc

SEQ ID NO: 125237 - DNA, 21 bp, Artificial Sequence
  primer
taagcatctttgagcgtgtgc

SEQ ID NO: 125238 - DNA, 35 bp, Artificial Sequence
  primer
gtaaaacgacggccagtcacctgtctcacctgccg

SEQ ID NO: 125239 - DNA, 21 bp, Artificial Sequence
  primer
ctgcaactgggagaacaagag

SEQ ID NO: 125240 - DNA, 38 bp, Artificial Sequence
  primer
gtaaaacgacggccagtaccaggtagggagaacgtctg

SEQ ID NO: 125241 - DNA, 21 bp, Artificial Sequence
  primer
tcctgttcctcaagtcactgc

SEQ ID NO: 125242 - DNA, 21 bp, Artificial Sequence
  primer
ccaaacacacttcccatctcc

SEQ ID NO: 125243 - DNA, 25 bp, Artificial Sequence
  primer
aaagaacaggtgttgtctctacgtc

SEQ ID NO: 125244 - DNA, 38 bp, Artificial Sequence
  primer
gtaaaacgacggccagtggagcccagactcactgtacc

SEQ ID NO: 125245 - DNA, 21 bp, Artificial Sequence
  primer
agacagatacacatgcccacc

SEQ ID NO: 125246 - DNA, 21 bp, Artificial Sequence
  primer
gagcagagtggagttgaggtg

SEQ ID NO: 125247 - DNA, 38 bp, Artificial Sequence
  primer
gtaaaacgacggccagtggtctggctggcttcactatg

SEQ ID NO: 125248 - DNA, 21 bp, Artificial Sequence
  primer
ctatgtgccaccttgtggaag

SEQ ID NO: 125249 - DNA, 38 bp, Artificial Sequence
  primer
gtaaaacgacggccagtagccatccgtggaaatctatg

SEQ ID NO: 125250 - DNA, 20 bp, Artificial Sequence
  primer
atcaaccctccaaccctgac

SEQ ID NO: 125251 - DNA, 38 bp, Artificial Sequence
  primer
gtaaaacgacggccagtaaggagtcaggaggtcgagtg

SEQ ID NO: 125252 - DNA, 21 bp, Artificial Sequence
  primer
ctcccaaatgcacagaggttc

SEQ ID NO: 125253 - DNA, 38 bp, Artificial Sequence
  primer
gtaaaacgacggccagtagagatctgagggcagtgagg

SEQ ID NO: 125254 - DNA, 38 bp, Artificial Sequence
  primer
gtaaaacgacggccagtagatgtcccgtttgtcaggag

SEQ ID NO: 125255 - DNA, 21 bp, Artificial Sequence
  primer
cactgtgtgacccaggatgag

SEQ ID NO: 125256 - DNA, 37 bp, Artificial Sequence
  primer
gtaaaacgacggccagtcagcctccaggtggaaagat

SEQ ID NO: 125257 - DNA, 21 bp, Artificial Sequence
  primer
cctctacccttgtgaggcttg

SEQ ID NO: 125258 - DNA, 37 bp, Artificial Sequence
  primer
gtaaaacgacggccagtcctccctctccataggcttg

SEQ ID NO: 125259 - DNA, 22 bp, Artificial Sequence
  primer
tggctctcatcagaacaaggag

SEQ ID NO: 125260 - DNA, 37 bp, Artificial Sequence
  primer
gtaaaacgacggccagtgagttggaggtgtgtggagc

SEQ ID NO: 125261 - DNA, 21 bp, Artificial Sequence
  primer
cagggaaatggaggcttacag

SEQ ID NO: 125262 - DNA, 20 bp, Artificial Sequence
  primer
cactcaaacttccaccaggg

SEQ ID NO: 125263 - DNA, 38 bp, Artificial Sequence
  primer
gtaaaacgacggccagtcagaaacaccacttccatccc

SEQ ID NO: 125264 - DNA, 20 bp, Artificial Sequence
  primer
ttctgggcatctttctgtgg

SEQ ID NO: 125265 - DNA, 22 bp, Artificial Sequence
  primer
tgctcacccagaagtaccaaac

SEQ ID NO: 125266 - DNA, 21 bp, Artificial Sequence
  primer
ccttcatcacaaccctagctg

SEQ ID NO: 125267 - DNA, 21 bp, Artificial Sequence
  primer
gccctccatagacatgacctc

SEQ ID NO: 125268 - DNA, 21 bp, Artificial Sequence
  primer
tgcagggaaggatgagagaag

SEQ ID NO: 125269 - DNA, 38 bp, Artificial Sequence
  primer
gtaaaacgacggccagtgcttctgtcaccacacaatcg

SEQ ID NO: 125270 - DNA, 38 bp, Artificial Sequence
  primer
gtaaaacgacggccagtaggacaggatctcacccactg

SEQ ID NO: 125271 - DNA, 20 bp, Artificial Sequence
  primer
ccagctgggtagggactgag

SEQ ID NO: 125272 - DNA, 38 bp, Artificial Sequence
  primer
gtaaaacgacggccagtttctcctgtctctcagcctcc

SEQ ID NO: 125273 - DNA, 21 bp, Artificial Sequence
  primer
gtccaaccctcttgctttgac

SEQ ID NO: 125274 - DNA, 19 bp, Artificial Sequence
  primer
agggacagggagtgaaggg

SEQ ID NO: 125275 - DNA, 21 bp, Artificial Sequence
  primer
agcacctgctgcagtacagac

SEQ ID NO: 125276 - DNA, 21 bp, Artificial Sequence
  primer
ttgtctgtatggtttgggcac

SEQ ID NO: 125277 - DNA, 38 bp, Artificial Sequence
  primer
gtaaaacgacggccagtgtgcttgactccatgcagatg

SEQ ID NO: 125278 - DNA, 20 bp, Artificial Sequence
  primer
agatgatccacccgcttcag

SEQ ID NO: 125279 - DNA, 21 bp, Artificial Sequence
  primer
tttcactcacccacacactgg

SEQ ID NO: 125280 - DNA, 38 bp, Artificial Sequence
  primer
gtaaaacgacggccagtactcactaccttctgggctgg

SEQ ID NO: 125281 - DNA, 18 bp, Artificial Sequence
  primer
cttggcatgcacaaagcc

SEQ ID NO: 125282 - DNA, 20 bp, Artificial Sequence
  primer
actaagtcgggtccacagcc

SEQ ID NO: 125283 - DNA, 35 bp, Artificial Sequence
  primer
gtaaaacgacggccagtgtcagccatcgcttctgg

SEQ ID NO: 125284 - DNA, 21 bp, Artificial Sequence
  primer
agaggcgctcagacatcagac

SEQ ID NO: 125285 - DNA, 38 bp, Artificial Sequence
  primer
gtaaaacgacggccagtgggatctagagggactcccag

SEQ ID NO: 125286 - DNA, 38 bp, Artificial Sequence
  primer
gtaaaacgacggccagtgccacagtgaaataggactgg

SEQ ID NO: 125287 - DNA, 20 bp, Artificial Sequence
  primer
acctcccacctccacatacc

SEQ ID NO: 125288 - DNA, 38 bp, Artificial Sequence
  primer
gtaaaacgacggccagtccaaggatccctttcatctcc

SEQ ID NO: 125289 - DNA, 38 bp, Artificial Sequence
  primer
gtaaaacgacggccagtgtagcaacctagcatggagcg

SEQ ID NO: 125290 - DNA, 38 bp, Artificial Sequence
  primer
gtaaaacgacggccagtaggtcagggtactgctgtgtg

SEQ ID NO: 125291 - DNA, 21 bp, Artificial Sequence
  primer
agtttcttgccaaagcacctg

SEQ ID NO: 125292 - DNA, 21 bp, Artificial Sequence
  primer
ggagaatcccgggaattaaag

SEQ ID NO: 125293 - DNA, 21 bp, Artificial Sequence
  primer
gttggtggtttgcctacagtg

SEQ ID NO: 125294 - DNA, 38 bp, Artificial Sequence
  primer
gtaaaacgacggccagttcgcagagaactggcattaag

SEQ ID NO: 125295 - DNA, 38 bp, Artificial Sequence
  primer
gtaaaacgacggccagtaccaacctctttcagcaaagc

SEQ ID NO: 125296 - DNA, 21 bp, Artificial Sequence
  primer
agcagtgcagtagccaaacag

SEQ ID NO: 125297 - DNA, 21 bp, Artificial Sequence
  primer
ggcttccaaacctgtcgtaag

SEQ ID NO: 125298 - DNA, 21 bp, Artificial Sequence
  primer
gccagagaactaaggtgccag

SEQ ID NO: 125299 - DNA, 38 bp, Artificial Sequence
  primer
gtaaaacgacggccagtattctgatgaggctgagtggg

SEQ ID NO: 125300 - DNA, 38 bp, Artificial Sequence
  primer
gtaaaacgacggccagtgtggaaccaggtctatcctgc

SEQ ID NO: 125301 - DNA, 21 bp, Artificial Sequence
  primer
gtgaagcagagagtgacaggg

SEQ ID NO: 125302 - DNA, 21 bp, Artificial Sequence
  primer
ggagtagcaggagaaactcgg

SEQ ID NO: 125303 - DNA, 21 bp, Artificial Sequence
  primer
agcaggttccagaccgtagag

SEQ ID NO: 125304 - DNA, 21 bp, Artificial Sequence
  primer
gttatgacctttgccctccag

SEQ ID NO: 125305 - DNA, 20 bp, Artificial Sequence
  primer
aaaggcagcgagaaacaacc

SEQ ID NO: 125306 - DNA, 37 bp, Artificial Sequence
  primer
gtaaaacgacggccagtgttgtcccacgttccaaatg

SEQ ID NO: 125307 - DNA, 38 bp, Artificial Sequence
  primer
gtaaaacgacggccagtatttctccgaagtccaccctc

SEQ ID NO: 125308 - DNA, 35 bp, Artificial Sequence
  primer
gtaaaacgacggccagtacctccgttcctgccctc

SEQ ID NO: 125309 - DNA, 19 bp, Artificial Sequence
  primer
cttactgcctgccctcctc

SEQ ID NO: 125310 - DNA, 38 bp, Artificial Sequence
  primer
gtaaaacgacggccagtgggaagagggtggaagaaatc

SEQ ID NO: 125311 - DNA, 38 bp, Artificial Sequence
  primer
gtaaaacgacggccagtagtctaaatgggcaggtggtg

SEQ ID NO: 125312 - DNA, 35 bp, Artificial Sequence
  primer
gtaaaacgacggccagtcaaggcacaacccaggtg

SEQ ID NO: 125313 - DNA, 37 bp, Artificial Sequence
  primer
gtaaaacgacggccagtgttgtgacgctcaagccttc

SEQ ID NO: 125314 - DNA, 38 bp, Artificial Sequence
  primer
gtaaaacgacggccagtgagggaaaggtaagtgagccc

SEQ ID NO: 125315 - DNA, 39 bp, Artificial Sequence
  primer
gtaaaacgacggccagtggtggtagatacaggtgggatg

SEQ ID NO: 125316 - DNA, 21 bp, Artificial Sequence
  primer
gggaactgtggaggacttcag

SEQ ID NO: 125317 - DNA, 38 bp, Artificial Sequence
  primer
gtaaaacgacggccagtgcccaatacactgattcaacg

SEQ ID NO: 125318 - DNA, 21 bp, Artificial Sequence
  primer
acacacttcttgttctccggg

SEQ ID NO: 125319 - DNA, 37 bp, Artificial Sequence
  primer
gtaaaacgacggccagttaatgatggcctctgcttgg

SEQ ID NO: 125320 - DNA, 21 bp, Artificial Sequence
  primer
catcttaactgcggtgccttc

SEQ ID NO: 125321 - DNA, 19 bp, Artificial Sequence
  primer
cttctctgtgtgcggaggg

SEQ ID NO: 125322 - DNA, 38 bp, Artificial Sequence
  primer
gtaaaacgacggccagttcccttgacacacaggatcac

SEQ ID NO: 125323 - DNA, 21 bp, Artificial Sequence
  primer
gttggaggcgtacttaaagcc

SEQ ID NO: 125324 - DNA, 39 bp, Artificial Sequence
  primer
gtaaaacgacggccagtttatcccaagctctacctgctg

SEQ ID NO: 125325 - DNA, 38 bp, Artificial Sequence
  primer
gtaaaacgacggccagtgaggctctaggcacagacagc

SEQ ID NO: 125326 - DNA, 18 bp, Artificial Sequence
  primer
tcctcggcgttcttccag

SEQ ID NO: 125327 - DNA, 21 bp, Artificial Sequence
  primer
ctctcaggctccgacttgatg

SEQ ID NO: 125328 - DNA, 38 bp, Artificial Sequence
  primer
gtaaaacgacggccagtcatgcacacacacaggtcttg

SEQ ID NO: 125329 - DNA, 38 bp, Artificial Sequence
  primer
gtaaaacgacggccagtggtttggaaggaaagagcatc

SEQ ID NO: 125330 - DNA, 37 bp, Artificial Sequence
  primer
gtaaaacgacggccagtggacaactggagctgcaaag

SEQ ID NO: 125331 - DNA, 38 bp, Artificial Sequence
  primer
gtaaaacgacggccagtacatggcagcagagactcatc

SEQ ID NO: 125332 - DNA, 23 bp, Artificial Sequence
  primer
gcactgtgaccacatagctgtag

SEQ ID NO: 125333 - DNA, 37 bp, Artificial Sequence; identical to SEQ ID NO: 125306
  primer

SEQ ID NO: 125334 - DNA, 24 bp, Artificial Sequence
  primer
aaatcaggaatctttgtcacattg

SEQ ID NO: 125335 - DNA, 21 bp, Artificial Sequence
  primer
gagaatgactcacagggtggg

SEQ ID NO: 125336 - DNA, 40 bp, Artificial Sequence
  primer
gtaaaacgacggccagtttgggttatcaataccaccactg

SEQ ID NO: 125337 - DNA, 41 bp, Artificial Sequence
  primer
gtaaaacgacggccagtttcaatgttcctaggccttaaatc

SEQ ID NO: 125338 - DNA, 38 bp, Artificial Sequence
  primer
gtaaaacgacggccagtatcagttaccaacgtccagcc

SEQ ID NO: 125339 - DNA, 38 bp, Artificial Sequence
  primer
gtaaaacgacggccagttaagggagaagccaatccttg

SEQ ID NO: 125340 - DNA, 38 bp, Artificial Sequence
  primer
gtaaaacgacggccagtttctttccagatacgaatggg

SEQ ID NO: 125341 - DNA, 21 bp, Artificial Sequence
  primer
cgcccagcatcataactattc

SEQ ID NO: 125342 - DNA, 20 bp, Artificial Sequence
  primer
atcatccatgatcacgccac

SEQ ID NO: 125343 - DNA, 38 bp, Artificial Sequence
  primer
gtaaaacgacggccagtagcctactgagtatttcgggc

SEQ ID NO: 125344 - DNA, 21 bp, Artificial Sequence
  primer
acatttcttgtgcagtggcag

SEQ ID NO: 125345 - DNA, 39 bp, Artificial Sequence
  primer
gtaaaacgacggccagttttctccctctgaatctggaag

SEQ ID NO: 125346 - DNA, 21 bp, Artificial Sequence
  primer
agccaattaccctgacctacg

SEQ ID NO: 125347 - DNA, 27 bp, Artificial Sequence
  primer
tttccaactctgaagtctctttaactc

SEQ ID NO: 125348 - DNA, 21 bp, Artificial Sequence
  primer
ctacagtagggatgctggcac

SEQ ID NO: 125349 - DNA, 38 bp, Artificial Sequence
  primer
gtaaaacgacggccagtaaggcaaacgtgtagcaatcc

SEQ ID NO: 125350 - DNA, 21 bp, Artificial Sequence
  primer
ctctttggtgggcctctgtag

SEQ ID NO: 125351 - DNA, 21 bp, Artificial Sequence
  primer
agttctctgcggctgaggtag

SEQ ID NO: 125352 - DNA, 37 bp, Artificial Sequence
  primer
gtaaaacgacggccagtccaaggtgcatgctgttctc

SEQ ID NO: 125353 - DNA, 21 bp, Artificial Sequence
  primer
aagcactgccaataatgcaac

SEQ ID NO: 125354 - DNA, 21 bp, Artificial Sequence
  primer
ctgaagacgaggtctgtttgg

SEQ ID NO: 125355 - DNA, 21 bp, Artificial Sequence
  primer
acagacccaaggtcattctgg

SEQ ID NO: 125356 - DNA, 37 bp, Artificial Sequence
  primer
gtaaaacgacggccagtagagagggagtgtgacgctg

SEQ ID NO: 125357 - DNA, 19 bp, Artificial Sequence
  primer
cttccagcggtgacagacc

SEQ ID NO: 125358 - DNA, 38 bp, Artificial Sequence
  primer
gtaaaacgacggccagtattgcagggatgaggaaattg

SEQ ID NO: 125359 - DNA, 21 bp, Artificial Sequence
  primer
gtaggtaccacccagcaccag

SEQ ID NO: 125360 - DNA, 38 bp, Artificial Sequence
  primer
gtaaaacgacggccagtggactctgagcttgggcatag

SEQ ID NO: 125361 - DNA, 38 bp, Artificial Sequence
  primer
gtaaaacgacggccagtcctctgttctctcaacctggg

SEQ ID NO: 125362 - DNA, 21 bp, Artificial Sequence
  primer
caacatatttggctccaaggg

SEQ ID NO: 125363 - DNA, 43 bp, Artificial Sequence
  primer
gtaaaacgacggccagtaggttctctaagtacccaaagtatgc

SEQ ID NO: 125364 - DNA, 39 bp, Artificial Sequence
  primer
gtaaaacgacggccagtccacacacggcattactatttg

SEQ ID NO: 125365 - DNA, 35 bp, Artificial Sequence
  primer
gtaaaacgacggccagtttgctattgtcgcccagg

SEQ ID NO: 125366 - DNA, 38 bp, Artificial Sequence
  primer
gtaaaacgacggccagtaccacagagcatggaagaagg

SEQ ID NO: 125367 - DNA, 39 bp, Artificial Sequence
  primer
gtaaaacgacggccagtcagggcatgcaatacagtaaga

SEQ ID NO: 125368 - DNA, 21 bp, Artificial Sequence
  primer
agcgttgtgcagatggagtaa

SEQ ID NO: 125369 - DNA, 21 bp, Artificial Sequence
  primer
gggtgttgataaagggagcac

SEQ ID NO: 125370 - DNA, 21 bp, Artificial Sequence
  primer
tataacgtgagggctgaatgc

SEQ ID NO: 125371 - DNA, 21 bp, Artificial Sequence
  primer
tcaagggtatgtgcatgtgtg

SEQ ID NO: 125372 - DNA, 38 bp, Artificial Sequence
  primer
gtaaaacgacggccagttgaaggatgcatcagtaaccc

SEQ ID NO: 125373 - DNA, 21 bp, Artificial Sequence
  primer
ttccttaggagagaacctggc

SEQ ID NO: 125374 - DNA, 38 bp, Artificial Sequence
  primer
gtaaaacgacggccagtttctgggcatctctgatgttc

SEQ ID NO: 125375 - DNA, 25 bp, Artificial Sequence
  primer
tcacccttctagaaacaatatccct

SEQ ID NO: 125376 - DNA, 21 bp, Artificial Sequence
  primer
gcacattgtccacatgtaccc

SEQ ID NO: 125377 - DNA, 38 bp, Artificial Sequence
  primer
gtaaaacgacggccagttacctcaaccatggcaaagag

SEQ ID NO: 125378 - DNA, 21 bp, Artificial Sequence
  primer
gggataggaaaccacaaaggc

SEQ ID NO: 125379 - DNA, 22 bp, Artificial Sequence
  primer
tcagaagatggtttgttgcttg

SEQ ID NO: 125380 - DNA, 37 bp, Artificial Sequence
  primer
gtaaaacgacggccagtaggttaaggctcttgaggcg

SEQ ID NO: 125381 - DNA, 21 bp, Artificial Sequence
  primer
tctcccaccttgtcacagaac

SEQ ID NO: 125382 - DNA, 38 bp, Artificial Sequence
  primer
gtaaaacgacggccagtggtaatgggaggatgaacagg

SEQ ID NO: 125383 - DNA, 38 bp, Artificial Sequence
  primer
gtaaaacgacggccagtatctgtgcgtaagtgtgcgtg

SEQ ID NO: 125384 - DNA, 21 bp, Artificial Sequence
  primer
cagcttcacaaggtaccggag

SEQ ID NO: 125385 - DNA, 21 bp, Artificial Sequence
  primer
gccactattacctgcgagtcc

SEQ ID NO: 125386 - DNA, 21 bp, Artificial Sequence
  primer
taccgagtatttgccctttgg

SEQ ID NO: 125387 - DNA, 20 bp, Artificial Sequence
  primer
gtgagatccagctcctccag

SEQ ID NO: 125388 - DNA, 38 bp, Artificial Sequence
  primer
gtaaaacgacggccagtttgcaggaagattcagaaccc

SEQ ID NO: 125389 - DNA, 21 bp, Artificial Sequence
  primer
ccagaggtcctcacagttcag

SEQ ID NO: 125390 - DNA, 38 bp, Artificial Sequence
  primer
gtaaaacgacggccagttaccagaagagcccattgagg

SEQ ID NO: 125391 - DNA, 38 bp, Artificial Sequence
  primer
gtaaaacgacggccagtaggttcacgaactccttctcg

SEQ ID NO: 125392 - DNA, 38 bp, Artificial Sequence
  primer
gtaaaacgacggccagttcagtccttctttcctcccac

SEQ ID NO: 125393 - DNA, 37 bp, Artificial Sequence
  primer
gtaaaacgacggccagtgagcacgagctcctctaggc

SEQ ID NO: 125394 - DNA, 35 bp, Artificial Sequence
  primer
gtaaaacgacggccagtttctgcggttcccactcc

SEQ ID NO: 125395 - DNA, 38 bp, Artificial Sequence
  primer
gtaaaacgacggccagtcttaggtcggctgctggatag

SEQ ID NO: 125396 - DNA, 18 bp, Artificial Sequence
  primer
acccgggactgtgtgtcc

SEQ ID NO: 125397 - DNA, 18 bp, Artificial Sequence
  primer
gggcatgcacaaagtccc

SEQ ID NO: 125398 - DNA, 40 bp, Artificial Sequence
  primer
gtaaaacgacggccagtgatgattcacttgagtctctggg

SEQ ID NO: 125399 - DNA, 38 bp, Artificial Sequence
  primer
gtaaaacgacggccagttgcaagtaccacacacaaaca

SEQ ID NO: 125400 - DNA, 24 bp, Artificial Sequence
  primer
tggtctgactgtcccttattcaag

SEQ ID NO: 125401 - DNA, 23 bp, Artificial Sequence
  primer
aaaggcacagctgtattcaattt

SEQ ID NO: 125402 - DNA, 43 bp, Artificial Sequence
  primer
gtaaaacgacggccagtcacaatgagcataagtgacgatagac

SEQ ID NO: 125403 - DNA, 23 bp, Artificial Sequence
  primer
ggagagaggatatgacatcaagc

SEQ ID NO: 125404 - DNA, 21 bp, Artificial Sequence
  primer
aaacccttccgagagatcagc

SEQ ID NO: 125405 - DNA, 21 bp, Artificial Sequence
  primer
ttccgagacagggtaggagtc

SEQ ID NO: 125406 - DNA, 21 bp, Artificial Sequence
  primer
tatcagcacacagggttccac

SEQ ID NO: 125407 - DNA, 21 bp, Artificial Sequence
  primer
agcagcttctctaggctggtg

SEQ ID NO: 125408 - DNA, 38 bp, Artificial Sequence
  primer
gtaaaacgacggccagtcacctcctggttgatgtagcc

SEQ ID NO: 125409 - DNA, 21 bp, Artificial Sequence
  primer
cagcggctgaaactgaagtag

SEQ ID NO: 125410 - DNA, 21 bp, Artificial Sequence
  primer
agtcagcgacagagcagacag

SEQ ID NO: 125411 - DNA, 38 bp, Artificial Sequence
  primer
gtaaaacgacggccagtgaagttggacccaatcagctc

SEQ ID NO: 125412 - DNA, 35 bp, Artificial Sequence
  primer
gtaaaacgacggccagtgccgatattgaccagccc

SEQ ID NO: 125413 - DNA, 37 bp, Artificial Sequence
  primer
gtaaaacgacggccagtagctcctctagatgccgctc

SEQ ID NO: 125414 - DNA, 38 bp, Artificial Sequence
  primer
gtaaaacgacggccagttccaagaaaccactggtaggc

SEQ ID NO: 125415 - DNA, 21 bp, Artificial Sequence
  primer
ctggtctacaagccacttccc

SEQ ID NO: 125416 - DNA, 38 bp, Artificial Sequence
  primer
gtaaaacgacggccagtgaatcctaggcgggacagaag

SEQ ID NO: 125417 - DNA, 21 bp, Artificial Sequence
  primer
cacagaaccagccaggactac

SEQ ID NO: 125418 - DNA, 21 bp, Artificial Sequence
  primer
agaacaaggtgagcaggaagg

SEQ ID NO: 125419 - DNA, 38 bp, Artificial Sequence
  primer
gtaaaacgacggccagtactcgcatgcagatacacagc

SEQ ID NO: 125420 - DNA, 38 bp, Artificial Sequence
  primer
gtaaaacgacggccagtagagagggccagagacctacc

SEQ ID NO: 125421 - DNA, 37 bp, Artificial Sequence
  primer
gtaaaacgacggccagtgaagcaggtgctgtgaggac

SEQ ID NO: 125422 - DNA, 38 bp, Artificial Sequence
  primer
gtaaaacgacggccagtccatccagcatgagtcagaag

SEQ ID NO: 125423 - DNA, 36 bp, Artificial Sequence
  primer
gtaaaacgacggccagtagtggagctgagaccaggc

SEQ ID NO: 125424 - DNA, 20 bp, Artificial Sequence
  primer
tgacactcaggaatcccagg

SEQ ID NO: 125425 - DNA, 19 bp, Artificial Sequence
  primer
caaacagcgtcacgtcgtc

SEQ ID NO: 125426 - DNA, 44 bp, Artificial Sequence
  primer
gtaaaacgacggccagtcagtgagaaagaagatagtcttggaac

SEQ ID NO: 125427 - DNA, 39 bp, Artificial Sequence
  primer
gtaaaacgacggccagtgagggattgggatgaaagaaac

SEQ ID NO: 125428 - DNA, 22 bp, Artificial Sequence
  primer
ttgatgtatgcaaatcccttcc

SEQ ID NO: 125429 - DNA, 38 bp, Artificial Sequence
  primer
gtaaaacgacggccagtttccaaagtcctggtcctctc

SEQ ID NO: 125430 - DNA, 21 bp, Artificial Sequence
  primer
cacacaggaggtcagatccag

SEQ ID NO: 125431 - DNA, 39 bp, Artificial Sequence
  primer
gtaaaacgacggccagtggagtcacctatttcttgctgg

SEQ ID NO: 125432 - DNA, 37 bp, Artificial Sequence
  primer
gtaaaacgacggccagtaggtgagggaacagtgggac

SEQ ID NO: 125433 - DNA, 21 bp, Artificial Sequence
  primer
gacacaggatggaaatcaggg

SEQ ID NO: 125434 - DNA, 19 bp, Artificial Sequence
  primer
ctggcaagcctgtcctctc

SEQ ID NO: 125435 - DNA, 21 bp, Artificial Sequence
  primer
ggacttccctagatttctggc

SEQ ID NO: 125436 - DNA, 38 bp, Artificial Sequence
  primer
gtaaaacgacggccagtgggtcaggatgatagcgagtc

SEQ ID NO: 125437 - DNA, 38 bp, Artificial Sequence
  primer
gtaaaacgacggccagtcccaaacagcttcttgttgtg

SEQ ID NO: 125438 - DNA, 37 bp, Artificial Sequence
  primer
gtaaaacgacggccagttggcttctgaaagtgttggg

SEQ ID NO: 125439 - DNA, 38 bp, Artificial Sequence
  primer
gtaaaacgacggccagtagattgggtgatggtggagtc

SEQ ID NO: 125440 - DNA, 20 bp, Artificial Sequence
  primer
cttctgggtcgcaagaaagg

SEQ ID NO: 125441 - DNA, 25 bp, Artificial Sequence
  primer
aatgcagagtaagattgttcaaagc

SEQ ID NO: 125442 - DNA, 38 bp, Artificial Sequence
  primer
gtaaaacgacggccagtgatggcctatgaaagaggctg

SEQ ID NO: 125443 - DNA, 21 bp, Artificial Sequence
  primer
gaaacccttggtaactttggg

SEQ ID NO: 125444 - DNA, 25 bp, Artificial Sequence
  primer
cagattataagcaatgtgtggttgc

SEQ ID NO: 125445 - DNA, 38 bp, Artificial Sequence
  primer
gtaaaacgacggccagtaatggcctgaatttaaggttg

SEQ ID NO: 125446 - DNA, 21 bp, Artificial Sequence
  primer
acagagttgccttcaattccc

SEQ ID NO: 125447 - DNA, 38 bp, Artificial Sequence
  primer
gtaaaacgacggccagtaacctttccctccagacaaac

SEQ ID NO: 125448 - DNA, 21 bp, Artificial Sequence
  primer
atcttatctatgccaaggccc

SEQ ID NO: 125449 - DNA, 38 bp, Artificial Sequence
  primer
gtaaaacgacggccagtaatttcaaagcgtctgcagtg

SEQ ID NO: 125450 - DNA, 38 bp, Artificial Sequence
  primer
gtaaaacgacggccagtcccttgctgcttgttcttctg

SEQ ID NO: 125451 - DNA, 38 bp, Artificial Sequence
  primer
gtaaaacgacggccagtcacctctgcctggaagatacc

SEQ ID NO: 125452 - DNA, 39 bp, Artificial Sequence
  primer
gtaaaacgacggccagtccagacactaagagctgggttc

SEQ ID NO: 125453 - DNA, 22 bp, Artificial Sequence
  primer
ctaaatttccatctctggagcc

SEQ ID NO: 125454 - DNA, 38 bp, Artificial Sequence
  primer
gtaaaacgacggccagtctggagagactccacggtagc

SEQ ID NO: 125455 - DNA, 23 bp, Artificial Sequence
  primer
aatgacactgtggtaaccatgac

SEQ ID NO: 125456 - DNA, 21 bp, Artificial Sequence
  primer
atggctgccaggaggtattat

SEQ ID NO: 125457 - DNA, 37 bp, Artificial Sequence
  primer
gtaaaacgacggccagtgcccaaggctgttaggtttg

SEQ ID NO: 125458 - DNA, 38 bp, Artificial Sequence
  primer
gtaaaacgacggccagtgggaaccatactcttcccagg

SEQ ID NO: 125459 - DNA, 38 bp, Artificial Sequence
  primer
gtaaaacgacggccagtcaatccatcacgacagtttgc

SEQ ID NO: 125460 - DNA, 21 bp, Artificial Sequence
  primer
tcgtaatttgctcttccctgc

SEQ ID NO: 125461 - DNA, 19 bp, Artificial Sequence
  primer
ctcctcctgcttcaccgag

SEQ ID NO: 125462 - DNA, 38 bp, Artificial Sequence
  primer
gtaaaacgacggccagtctcatgtccagcaaatccaac

SEQ ID NO: 125463 - DNA, 40 bp, Artificial Sequence
  primer
gtaaaacgacggccagtaaaggcatgagaagatgtactgg

SEQ ID NO: 125464 - DNA, 26 bp, Artificial Sequence
  primer
tcctatagacgcctctgtaaatttct

SEQ ID NO: 125465 - DNA, 43 bp, Artificial Sequence
  primer
gtaaaacgacggccagttgaagcagtcatattaatccaccttc

SEQ ID NO: 125466 - DNA, 38 bp, Artificial Sequence
  primer
gtaaaacgacggccagtaaagtacagatgggtggcagg

SEQ ID NO: 125467 - DNA, 21 bp, Artificial Sequence
  primer
ccaagatgcttggacacttcc

SEQ ID NO: 125468 - DNA, 38 bp, Artificial Sequence
  primer
gtaaaacgacggccagtaactcattcatgggtcttccg

SEQ ID NO: 125469 - DNA, 38 bp, Artificial Sequence
  primer
gtaaaacgacggccagttacttcagctggtggatttgg

SEQ ID NO: 125470 - DNA, 38 bp, Artificial Sequence
  primer
gtaaaacgacggccagtggcccatgtccctatgagttc

SEQ ID NO: 125471 - DNA, 41 bp, Artificial Sequence
  primer
gtaaaacgacggccagttcaattaccgatgctcagtaaaca

SEQ ID NO: 125472 - DNA, 21 bp, Artificial Sequence
  primer
gcagcagcattctaaacatga

SEQ ID NO: 125473 - DNA, 25 bp, Artificial Sequence
  primer
tcagaaggcatcataaacttgattt

SEQ ID NO: 125474 - DNA, 22 bp, Artificial Sequence
  primer
ttgaaagcaagggacaaagaag

SEQ ID NO: 125475 - DNA, 21 bp, Artificial Sequence
  primer
ttcctatcaaaccaagccatc

SEQ ID NO: 125476 - DNA, 22 bp, Artificial Sequence
  primer
tcttgaagagaagtgcttgcag

SEQ ID NO: 125477 - DNA, 22 bp, Artificial Sequence
  primer
ccttgccatctttaacaagtga

SEQ ID NO: 125478 - DNA, 40 bp, Artificial Sequence
  primer
gtaaaacgacggccagttccatcaaccagatacatcttcc

SEQ ID NO: 125479 - DNA, 25 bp, Artificial Sequence
  primer
gcctaacttgaattattcctcaacc

SEQ ID NO: 125480 - DNA, 37 bp, Artificial Sequence
  primer
gtaaaacgacggccagtgtttctctctctggccttgc

SEQ ID NO: 125481 - DNA, 25 bp, Artificial Sequence
  primer
aaacgagaaataatcctatgcactc

SEQ ID NO: 125482 - DNA, 25 bp, Artificial Sequence
  primer
cccttaattaaactcaggaatgagc

SEQ ID NO: 125483 - DNA, 37 bp, Artificial Sequence
  primer
gtaaaacgacggccagttggatcagctgggacctatg

SEQ ID NO: 125484 - DNA, 39 bp, Artificial Sequence
  primer
gtaaaacgacggccagtaagaaacaggcttagtccaggg

SEQ ID NO: 125485 - DNA, 39 bp, Artificial Sequence
  primer
gtaaaacgacggccagtgcagaagattctgggagtgatg

SEQ ID NO: 125486 - DNA, 43 bp, Artificial Sequence
  primer
gtaaaacgacggccagtatattctggaactgataactcacctg

SEQ ID NO: 125487 - DNA, 41 bp, Artificial Sequence
  primer
gtaaaacgacggccagtaatggatttgaactgacagaaatg

SEQ ID NO: 125488 - DNA, 27 bp, Artificial Sequence
  primer
aaatctgaaagtaagatagtctgggaa

SEQ ID NO: 125489 - DNA, 43 bp, Artificial Sequence
  primer
gtaaaacgacggccagtggttaacacaagaaatgtgctatgag

SEQ ID NO: 125490 - DNA, 18 bp, Artificial Sequence
  primer
ctctcggactgagcggtg

SEQ ID NO: 125491 - DNA, 38 bp, Artificial Sequence
  primer
gtaaaacgacggccagtatgttcccacacgagtccttc

SEQ ID NO: 125492 - DNA, 36 bp, Artificial Sequence
  primer
gtaaaacgacggccagtcgcctctgatacctccctg

SEQ ID NO: 125493 - DNA, 21 bp, Artificial Sequence
  primer
ctcctccaagaagctcaccac

SEQ ID NO: 125494 - DNA, 38 bp, Artificial Sequence
  primer
gtaaaacgacggccagtggtaggtcacagggtcagtgg

SEQ ID NO: 125495 - DNA, 38 bp, Artificial Sequence
  primer
gtaaaacgacggccagtcagccacatcaggttcaacag

SEQ ID NO: 125496 - DNA, 21 bp, Artificial Sequence
  primer
tctgcagtgaaaggagtgagc

SEQ ID NO: 125497 - DNA, 19 bp, Artificial Sequence
  primer
ggacacaacttccaggccc

SEQ ID NO: 125498 - DNA, 21 bp, Artificial Sequence
  primer
taccctgaggaccacacacac

SEQ ID NO: 125499 - DNA, 39 bp, Artificial Sequence
  primer
gtaaaacgacggccagtgggaagttgcttaaagagaccc

SEQ ID NO: 125500 - DNA, 21 bp, Artificial Sequence
  primer
gaactgtaactgcagcgcaac

SEQ ID NO: 125501 - DNA, 19 bp, Artificial Sequence
  primer
gtctatgctggcctgctcc

SEQ ID NO: 125502 - DNA, 38 bp, Artificial Sequence
  primer
gtaaaacgacggccagtttacctgacacatccaggtgc

SEQ ID NO: 125503 - DNA, 38 bp, Artificial Sequence
  primer
gtaaaacgacggccagttctctgatggcttgcaagaag

SEQ ID NO: 125504 - DNA, 38 bp, Artificial Sequence
  primer
gtaaaacgacggccagttgagtttggtgcagttcttgg

SEQ ID NO: 125505 - DNA, 21 bp, Artificial Sequence
  primer
aatacaacgccggatgaactc

SEQ ID NO: 125506 - DNA, 38 bp, Artificial Sequence
  primer
gtaaaacgacggccagttgggtgtcggtgcttacatac

SEQ ID NO: 125507 - DNA, 38 bp, Artificial Sequence
  primer
gtaaaacgacggccagtatctacctagcccacgactcc

SEQ ID NO: 125508 - DNA, 38 bp, Artificial Sequence
  primer
gtaaaacgacggccagtgacaaactggctaggtgcagg

SEQ ID NO: 125509 - DNA, 37 bp, Artificial Sequence
  primer
gtaaaacgacggccagtgtgtcgcctgagaggttgag

SEQ ID NO: 125510 - DNA, 38 bp, Artificial Sequence
  primer
gtaaaacgacggccagtgttccctctcagagcgcttac

SEQ ID NO: 125511 - DNA, 38 bp, Artificial Sequence
  primer
gtaaaacgacggccagtaaagaaggcactagcactcgg

SEQ ID NO: 125512 - DNA, 23 bp, Artificial Sequence
  primer
tttctgtagttgaagttgaggcg

SEQ ID NO: 125513 - DNA, 22 bp, Artificial Sequence
  primer
aaagtcagagggagaggtcagg

SEQ ID NO: 125514 - DNA, 40 bp, Artificial Sequence
  primer
gtaaaacgacggccagtccgactttcctaccatgtttagc

SEQ ID NO: 125515 - DNA, 38 bp, Artificial Sequence
  primer
gtaaaacgacggccagtcgcccagcctaaacttatttc

SEQ ID NO: 125516 - DNA, 18 bp, Artificial Sequence
  primer
cccaccaagggcatcttc

SEQ ID NO: 125517 - DNA, 41 bp, Artificial Sequence
  primer
gtaaaacgacggccagttcttcattcctactttaccagcag

SEQ ID NO: 125518 - DNA, 21 bp, Artificial Sequence
  primer
tgtgcagatttgtcatcaggg

SEQ ID NO: 125519 - DNA, 38 bp, Artificial Sequence
  primer
gtaaaacgacggccagttacagtgcttgatggtgggac

SEQ ID NO: 125520 - DNA, 21 bp, Artificial Sequence
  primer
taacccaaatcccagctaacg

SEQ ID NO: 125521 - DNA, 39 bp, Artificial Sequence
  primer
gtaaaacgacggccagttgcctaagaacgctatcacctc

SEQ ID NO: 125522 - DNA, 41 bp, Artificial Sequence
  primer
gtaaaacgacggccagtcaatagctatggctcattcagatg

SEQ ID NO: 125523 - DNA, 38 bp, Artificial Sequence
  primer
gtaaaacgacggccagttcagtgcttccacttgggtag

SEQ ID NO: 125524 - DNA, 25 bp, Artificial Sequence
  primer
ttaagatactggcagggagaagaag

SEQ ID NO: 125525 - DNA, 23 bp, Artificial Sequence
  primer
ccacatactcctaactccctccc

SEQ ID NO: 125526 - DNA, 37 bp, Artificial Sequence
  primer
gtaaaacgacggccagtccagtggcttctgtcctcac

SEQ ID NO: 125527 - DNA, 18 bp, Artificial Sequence
  primer
gtgatccacccatctcgg

SEQ ID NO: 125528 - DNA, 41 bp, Artificial Sequence
  primer
gtaaaacgacggccagtggcactaatctcctaaaccagttc

SEQ ID NO: 125529 - DNA, 21 bp, Artificial Sequence
  primer
cattcagccacttcagcacac

SEQ ID NO: 125530 - DNA, 22 bp, Artificial Sequence
  primer
tccaaccatttagaaccaaagc

SEQ ID NO: 125531 - DNA, 21 bp, Artificial Sequence
  primer
accacgcctacccacagttac

SEQ ID NO: 125532 - DNA, 37 bp, Artificial Sequence
  primer
gtaaaacgacggccagttgttccagcaccacagtcac

SEQ ID NO: 125533 - DNA, 21 bp, Artificial Sequence
  primer
acccagctttgagatcctgag

SEQ ID NO: 125534 - DNA, 40 bp, Artificial Sequence
  primer
gtaaaacgacggccagtcatttgacatttccacttgtgtg

SEQ ID NO: 125535 - DNA, 21 bp, Artificial Sequence
  primer
tcagcagatgcagaaggctat

SEQ ID NO: 125536 - DNA, 47 bp, Artificial Sequence
  primer
gtaaaacgacggccagtaagttaaatttagacctaatcagaaatgtg

SEQ ID NO: 125537 - DNA, 38 bp, Artificial Sequence
  primer
gtaaaacgacggccagtaacagagagggccatgttagc

SEQ ID NO: 125538 - DNA, 21 bp, Artificial Sequence
  primer
aattgtgcctgttggtttgtg

SEQ ID NO: 125539 - DNA, 38 bp, Artificial Sequence
  primer
gtaaaacgacggccagtagtgaccagtgagggcaattc

SEQ ID NO: 125540 - DNA, 38 bp, Artificial Sequence
  primer
gtaaaacgacggccagtatgagtgaatccactggctgt

SEQ ID NO: 125541 - DNA, 21 bp, Artificial Sequence
  primer
gagatgaaaggcattgcacag

SEQ ID NO: 125542 - DNA, 21 bp, Artificial Sequence
  primer
ttgcccatatagcatgggttc

SEQ ID NO: 125543 - DNA, 20 bp, Artificial Sequence
  primer
ttgagcttcctaagcctccg

SEQ ID NO: 125544 - DNA, 21 bp, Artificial Sequence
  primer
gtgtgtatgcctgtgtttccc

SEQ ID NO: 125545 - DNA, 22 bp, Artificial Sequence
  primer
tcctttgaactacctcccttcc

SEQ ID NO: 125546 - DNA, 23 bp, Artificial Sequence
  primer
tctcttcgtatactgaaatgcca

SEQ ID NO: 125547 - DNA, 21 bp, Artificial Sequence
  primer
gccagtcagtgtcagaaaccc

SEQ ID NO: 125548 - DNA, 40 bp, Artificial Sequence
  primer
gtaaaacgacggccagtgctggtcttgaattctttgatcc

SEQ ID NO: 125549 - DNA, 21 bp, Artificial Sequence
  primer
tccatgttcagtccactttgg

SEQ ID NO: 125550 - DNA, 18 bp, Artificial Sequence
  primer
ctcagactctgtcccggc

SEQ ID NO: 125551 - DNA, 21 bp, Artificial Sequence
  primer
gtgacgatgaggacagtgtgg

SEQ ID NO: 125552 - DNA, 38 bp, Artificial Sequence
  primer
gtaaaacgacggccagtacaaagggtgcacagtgacag

SEQ ID NO: 125553 - DNA, 21 bp, Artificial Sequence
  primer
agtgacagaagggaaaccgag

SEQ ID NO: 125554 - DNA, 20 bp, Artificial Sequence
  primer
agctccagtgatcctcccac

SEQ ID NO: 125555 - DNA, 21 bp, Artificial Sequence
  primer
gcacttcttctgaagtgtggg

SEQ ID NO: 125556 - DNA, 38 bp, Artificial Sequence
  primer
gtaaaacgacggccagtacaaagatccacagagggcag

SEQ ID NO: 125557 - DNA, 19 bp, Artificial Sequence
  primer
ctcccgaccgagttcagtg

SEQ ID NO: 125558 - DNA, 22 bp, Artificial Sequence
  primer
gcaacaagattgaaactccgtc

SEQ ID NO: 125559 - DNA, 21 bp, Artificial Sequence
  primer
atagaggtcttccaccgggag

SEQ ID NO: 125560 - DNA, 21 bp, Artificial Sequence
  primer
ttctgaaggcaaatggaaacc

SEQ ID NO: 125561 - DNA, 21 bp, Artificial Sequence
  primer
gagcacttagtggtggctgtg

SEQ ID NO: 125562 - DNA, 21 bp, Artificial Sequence
  primer
tcctcaaccaaatgggaaatc

SEQ ID NO: 125563 - DNA, 21 bp, Artificial Sequence
  primer
accagcctttccacatcaaac

SEQ ID NO: 125564 - DNA, 39 bp, Artificial Sequence
  primer
gtaaaacgacggccagttcaggcaatgtcactgaatcac

SEQ ID NO: 125565 - DNA, 37 bp, Artificial Sequence
  primer
gtaaaacgacggccagtaaagatgccctggcaggtag

SEQ ID NO: 125566 - DNA, 21 bp, Artificial Sequence
  primer
aacagcactacactcctcggg

SEQ ID NO: 125567 - DNA, 21 bp, Artificial Sequence
  primer
ctcagctgccagagtttcaag

SEQ ID NO: 125568 - DNA, 21 bp, Artificial Sequence
  primer
tgacagagaaatctgcttggg

SEQ ID NO: 125569 - DNA, 20 bp, Artificial Sequence
  primer
cataccacctttcacagggc

SEQ ID NO: 125570 - DNA, 39 bp, Artificial Sequence
  primer
gtaaaacgacggccagtaatgccacctttagggagagag

SEQ ID NO: 125571 - DNA, 38 bp, Artificial Sequence
  primer
gtaaaacgacggccagtaaggtgaacatttccattggg

SEQ ID NO: 125572 - DNA, 37 bp, Artificial Sequence
  primer
gtaaaacgacggccagtactgggcctgcttctttctc

SEQ ID NO: 125573 - DNA, 18 bp, Artificial Sequence
  primer
ggtgggcattgcagtgag

SEQ ID NO: 125574 - DNA, 20 bp, Artificial Sequence
  primer
gtgcaaaggaagcattccag

SEQ ID NO: 125575 - DNA, 38 bp, Artificial Sequence
  primer
gtaaaacgacggccagtaagcagcgtttctcttccaac

SEQ ID NO: 125576 - DNA, 38 bp, Artificial Sequence
  primer
gtaaaacgacggccagtcaacccagataagcacagagc

SEQ ID NO: 125577 - DNA, 38 bp, Artificial Sequence
  primer
gtaaaacgacggccagtcagaaagtgctgtgggtgaac

SEQ ID NO: 125578 - DNA, 20 bp, Artificial Sequence
  primer
ctcccgccagaccaagatag

SEQ ID NO: 125579 - DNA, 37 bp, Artificial Sequence
  primer
gtaaaacgacggccagtatttctccctcaaagccagg

SEQ ID NO: 125580 - DNA, 20 bp, Artificial Sequence
  primer
aatgacctgtgctttgcgac

SEQ ID NO: 125581 - DNA, 21 bp, Artificial Sequence
  primer
acggaagttgtcaacctttgc

SEQ ID NO: 125582 - DNA, 37 bp, Artificial Sequence
  primer
gtaaaacgacggccagtcggtgactatctcagcccag

SEQ ID NO: 125583 - DNA, 22 bp, Artificial Sequence
  primer
ggtgaggacgctatggactaag

SEQ ID NO: 125584 - DNA, 38 bp, Artificial Sequence
  primer
gtaaaacgacggccagtgaggcctttgtctgtctgtcc

SEQ ID NO: 125585 - DNA, 38 bp, Artificial Sequence
  primer
gtaaaacgacggccagtgacacaatgactcttgcagcc

SEQ ID NO: 125586 - DNA, 20 bp, Artificial Sequence
  primer
tccagggtttagccacacag

SEQ ID NO: 125587 - DNA, 21 bp, Artificial Sequence
  primer
acacaattccctctgctggtc

SEQ ID NO: 125588 - DNA, 38 bp, Artificial Sequence
  primer
gtaaaacgacggccagttgttgccaatctaggaagcag

SEQ ID NO: 125589 - DNA, 21 bp, Artificial Sequence
  primer
ggttgcggtaagctatgatcg

SEQ ID NO: 125590 - DNA, 21 bp, Artificial Sequence
  primer
gttccatcaccaccctagtcc

SEQ ID NO: 125591 - DNA, 23 bp, Artificial Sequence
  primer
gggtctactgcaaagatctcaac

SEQ ID NO: 125592 - DNA, 38 bp, Artificial Sequence
  primer
gtaaaacgacggccagtaaagataagcttgtcacgggc

SEQ ID NO: 125593 - DNA, 21 bp, Artificial Sequence
  primer
ctcctcctccactgtgtcctg

SEQ ID NO: 125594 - DNA, 37 bp, Artificial Sequence
  primer
gtaaaacgacggccagtcccacagtacctacccgagg

SEQ ID NO: 125595 - DNA, 21 bp, Artificial Sequence
  primer
ctactggtggagtggctttcc

SEQ ID NO: 125596 - DNA, 20 bp, Artificial Sequence
  primer
gtcacctcaggtagggcgag

SEQ ID NO: 125597 - DNA, 24 bp, Artificial Sequence
  primer
cggtcaaataaatcatgacacatc

SEQ ID NO: 125598 - DNA, 39 bp, Artificial Sequence
  primer
gtaaaacgacggccagttgatgcatactacaggtggcag

SEQ ID NO: 125599 - DNA, 41 bp, Artificial Sequence
  primer
gtaaaacgacggccagtaatgccatggtaaatatgactgac

SEQ ID NO: 125600 - DNA, 23 bp, Artificial Sequence
  primer
tcccaaaggaacctaatatccac

SEQ ID NO: 125601 - DNA, 23 bp, Artificial Sequence
  primer
gcagaattatgttcagtaagccc

SEQ ID NO: 125602 - DNA, 38 bp, Artificial Sequence
  primer
gtaaaacgacggccagtatacacatggcccaagtttcc

SEQ ID NO: 125603 - DNA, 38 bp, Artificial Sequence
  primer
gtaaaacgacggccagtagagagcaggaaggctaaggc

SEQ ID NO: 125604 - DNA, 21 bp, Artificial Sequence
  primer
tggattctgtggaatctggag

SEQ ID NO: 125605 - DNA, 20 bp, Artificial Sequence
  primer
ctgccagaggcttcacagtc

SEQ ID NO: 125606 - DNA, 21 bp, Artificial Sequence
  primer
ggtctctgactgggaggaatg

SEQ ID NO: 125607 - DNA, 20 bp, Artificial Sequence
  primer
aagcactgttgggagtgtgg

SEQ ID NO: 125608 - DNA, 20 bp, Artificial Sequence
  primer
caggtgtaagccactgcacc

SEQ ID NO: 125609 - DNA, 21 bp, Artificial Sequence
  primer
atatggaacccagtctgaggg

SEQ ID NO: 125610 - DNA, 21 bp, Artificial Sequence
  primer
cagctggagtaagggtgaagg

SEQ ID NO: 125611 - DNA, 37 bp, Artificial Sequence
  primer
gtaaaacgacggccagtgctcaagcgatactccctcc

SEQ ID NO: 125612 - DNA, 21 bp, Artificial Sequence
  primer
tggattctgtggaatctggag

SEQ ID NO: 125613 - DNA, 37 bp, Artificial Sequence
  primer
gtaaaacgacggccagtagctacagcctgtgggcttc

SEQ ID NO: 125614 - DNA, 21 bp, Artificial Sequence
  primer
cattcttaccctggttagccg

SEQ ID NO: 125615 - DNA, 21 bp, Artificial Sequence
  primer
tcttacccactgaaacggttg

SEQ ID NO: 125616 - DNA, 38 bp, Artificial Sequence
  primer
gtaaaacgacggccagtgttatggagctttgcagggac

SEQ ID NO: 125617 - DNA, 38 bp, Artificial Sequence
  primer
gtaaaacgacggccagttcttacccactgaaacggttg

SEQ ID NO: 125618 - DNA, 20 bp, Artificial Sequence
  primer
atgcacatgcaagcacacac

SEQ ID NO: 125619 - DNA, 38 bp, Artificial Sequence
  primer
gtaaaacgacggccagttaatacgcagcaaacaggcac

SEQ ID NO: 125620 - DNA, 38 bp, Artificial Sequence
  primer
gtaaaacgacggccagtacactgggaactggaaggatg

SEQ ID NO: 125621 - DNA, 39 bp, Artificial Sequence
  primer
gtaaaacgacggccagtttgctattcccactgtctttcc

SEQ ID NO: 125622 - DNA, 40 bp, Artificial Sequence
  primer
gtaaaacgacggccagtggtgagtttatagggtatggccc

SEQ ID NO: 125623 - DNA, 40 bp, Artificial Sequence
  primer
gtaaaacgacggccagttcagcgtttctggtttaagctac

SEQ ID NO: 125624 - DNA, 21 bp, Artificial Sequence
  primer
agttcttcccaggctttctgg

SEQ ID NO: 125625 - DNA, 38 bp, Artificial Sequence
  primer
gtaaaacgacggccagtaagtcagcgagagctggaatc

SEQ ID NO: 125626 - DNA, 37 bp, Artificial Sequence
  primer
gtaaaacgacggccagtccagcatcctggacttcctc

SEQ ID NO: 125627 - DNA, 39 bp, Artificial Sequence
  primer
gtaaaacgacggccagtgaatgcaggagacagggtaatg

SEQ ID NO: 125628 - DNA, 18 bp, Artificial Sequence
  primer
accatggctggcctgaac

SEQ ID NO: 125629 - DNA, 20 bp, Artificial Sequence
  primer
acccagccagactgtcactg

SEQ ID NO: 125630 - DNA, 21 bp, Artificial Sequence
  primer
gaggtacaagtgcttggttgg

SEQ ID NO: 125631 - DNA, 20 bp, Artificial Sequence
  primer
tccctcccagatctgtagcc

SEQ ID NO: 125632 - DNA, 38 bp, Artificial Sequence
  primer
gtaaaacgacggccagttcacaaacggtgagaatggac

SEQ ID NO: 125633 - DNA, 44 bp, Artificial Sequence
  primer
gtaaaacgacggccagtaagaatattagggtttcgactatttca

SEQ ID NO: 125634 - DNA, 26 bp, Artificial Sequence
  primer
tgctgccaataaacaactactaacac

SEQ ID NO: 125635 - DNA, 38 bp, Artificial Sequence
  primer
gtaaaacgacggccagtgagagtctatggcttccgtgg

SEQ ID NO: 125636 - DNA, 37 bp, Artificial Sequence
  primer
gtaaaacgacggccagtggacaccatgttgctcacag

SEQ ID NO: 125637 - DNA, 20 bp, Artificial Sequence
  primer
acaggaggaagactcagggc

SEQ ID NO: 125638 - DNA, 40 bp, Artificial Sequence
  primer
gtaaaacgacggccagtaagggttagagaggagaatcagg

SEQ ID NO: 125639 - DNA, 40 bp, Artificial Sequence
  primer
gtaaaacgacggccagtgttgggttaacacagttgcgtag

SEQ ID NO: 125640 - DNA, 25 bp, Artificial Sequence
  primer
ccatgcttctttaatttgttaaggg

SEQ ID NO: 125641 - DNA, 19 bp, Artificial Sequence
  primer
ttctcttgggttccatgcc

SEQ ID NO: 125642 - DNA, 21 bp, Artificial Sequence
  primer
tgaaattgccagctgctaaag

SEQ ID NO: 125643 - DNA, 41 bp, Artificial Sequence
  primer
gtaaaacgacggccagtggaaacttcatttcatgatctgtg

SEQ ID NO: 125644 - DNA, 21 bp, Artificial Sequence
  primer
atccaccttcctccaaacttc

SEQ ID NO: 125645 - DNA, 21 bp, Artificial Sequence
  primer
ccctttctgccctatgtgttc

SEQ ID NO: 125646 - DNA, 21 bp, Artificial Sequence
  primer
ctatttgcctggcttatctgc

SEQ ID NO: 125647 - DNA, 21 bp, Artificial Sequence
  primer
atagaacccagggcctgaaac

SEQ ID NO: 125648 - DNA, 23 bp, Artificial Sequence
  primer
tcactatttaagcaaggcactcg

SEQ ID NO: 125649 - DNA, 21 bp, Artificial Sequence
  primer
tgcataactaactggccatcg

SEQ ID NO: 125650 - DNA, 38 bp, Artificial Sequence
  primer
gtaaaacgacggccagtcatccatgtcatttgggacac

SEQ ID NO: 125651 - DNA, 21 bp, Artificial Sequence
  primer
atgctgaactgtgccattagg

SEQ ID NO: 125652 - DNA, 39 bp, Artificial Sequence
  primer
gtaaaacgacggccagttctgcaacttccaaatctgatg

SEQ ID NO: 125653 - DNA, 38 bp, Artificial Sequence
  primer
gtaaaacgacggccagtgttccatccagccattgagtc

SEQ ID NO: 125654 - DNA, 21 bp, Artificial Sequence
  primer
actgcagtatgaccatgccac

SEQ ID NO: 125655 - DNA, 23 bp, Artificial Sequence
  primer
tcacacatttcaaacattaaggc

SEQ ID NO: 125656 - DNA, 21 bp, Artificial Sequence
  primer
ccagaatgggagaatacggtg

SEQ ID NO: 125657 - DNA, 38 bp, Artificial Sequence
  primer
gtaaaacgacggccagtgtacccaggtagaagaggccc

SEQ ID NO: 125658 - DNA, 20 bp, Artificial Sequence
  primer
agctgagaatagcacggcag

SEQ ID NO: 125659 - DNA, 37 bp, Artificial Sequence
  primer
gtaaaacgacggccagtccgcatgggtctgtactttc

SEQ ID NO: 125660 - DNA, 21 bp, Artificial Sequence
  primer
gcacccactgagacaaaggac

SEQ ID NO: 125661 - DNA, 21 bp, Artificial Sequence
  primer
ccaagttccctgactccacag

SEQ ID NO: 125662 - DNA, 20 bp, Artificial Sequence
  primer
cgcatccttaccacatcctg

SEQ ID NO: 125663 - DNA, 36 bp, Artificial Sequence
  primer
gtaaaacgacggccagttgaggtcacaggccctctc

SEQ ID NO: 125664 - DNA, 19 bp, Artificial Sequence
  primer
aaaggccggatttccaaag

SEQ ID NO: 125665 - DNA, 20 bp, Artificial Sequence
  primer
gtcagggtctccctcctcag

SEQ ID NO: 125666 - DNA, 22 bp, Artificial Sequence
  primer
aacactgaggcagatgtgtgac

SEQ ID NO: 125667 - DNA, 38 bp, Artificial Sequence
  primer
gtaaaacgacggccagttttccctccctaccatatccc

SEQ ID NO: 125668 - DNA, 23 bp, Artificial Sequence
  primer
gggaaactacttcaagacaaccc

SEQ ID NO: 125669 - DNA, 22 bp, Artificial Sequence
  primer
ccctttccgaactggaatttag

SEQ ID NO: 125670 - DNA, 38 bp, Artificial Sequence
  primer
gtaaaacgacggccagtaaagtcttggcgagtctgtcc

SEQ ID NO: 125671 - DNA, 38 bp, Artificial Sequence
  primer
gtaaaacgacggccagtaaccagggaacctggaatagg

SEQ ID NO: 125672 - DNA, 36 bp, Artificial Sequence
  primer
gtaaaacgacggccagtatgctggctggcactcttg

SEQ ID NO: 125673 - DNA, 38 bp, Artificial Sequence
  primer
gtaaaacgacggccagtctctgaagtttcgagccaatg

SEQ ID NO: 125674 - DNA, 21 bp, Artificial Sequence
  primer
ccggatagaagaggcactcac

SEQ ID NO: 125675 - DNA, 37 bp, Artificial Sequence
  primer
gtaaaacgacggccagtcgggcacgtattatgcacag

SEQ ID NO: 125676 - DNA, 47 bp, Artificial Sequence
  primer
gtaaaacgacggccagttcttctgtttgtatctcataatttcttagg

SEQ ID NO: 125677 - DNA, 21 bp, Artificial Sequence
  primer
tatagacccgaaagctggtgc

SEQ ID NO: 125678 - DNA, 38 bp, Artificial Sequence
  primer
gtaaaacgacggccagttcacctaccatgaattgccag

SEQ ID NO: 125679 - DNA, 21 bp, Artificial Sequence
  primer
gaagctggagcagaacacttg

SEQ ID NO: 125680 - DNA, 22 bp, Artificial Sequence
  primer
ccaatacccgactacgttcttt

SEQ ID NO: 125681 - DNA, 21 bp, Artificial Sequence
  primer
caaatggctttcgagatgatg

SEQ ID NO: 125682 - DNA, 21 bp, Artificial Sequence
  primer
agcccagatatcaagtggtcc

SEQ ID NO: 125683 - DNA, 21 bp, Artificial Sequence
  primer
attgcaggtgagtttgtgcag

SEQ ID NO: 125684 - DNA, 21 bp, Artificial Sequence
  primer
agggccacaatccacagatac

SEQ ID NO: 125685 - DNA, 21 bp, Artificial Sequence
  primer
aatggaaggctggtctttgtc

SEQ ID NO: 125686 - DNA, 39 bp, Artificial Sequence
  primer
gtaaaacgacggccagtgaagaggctggcagtacaaatg

SEQ ID NO: 125687 - DNA, 41 bp, Artificial Sequence
  primer
gtaaaacgacggccagttgataaacttgaaatagcagcagg

SEQ ID NO: 125688 - DNA, 38 bp, Artificial Sequence
  primer
gtaaaacgacggccagtcgctcatttgaacggtgtatc

SEQ ID NO: 125689 - DNA, 19 bp, Artificial Sequence
  primer
ctcttggcctagcacagcc

SEQ ID NO: 125690 - DNA, 20 bp, Artificial Sequence
  primer
cccggccaaatgctaatatg

SEQ ID NO: 125691 - DNA, 22 bp, Artificial Sequence
  primer
catttcatctctgctgcttgtg

SEQ ID NO: 125692 - DNA, 21 bp, Artificial Sequence
  primer
acgagtttcaaatggctccac

SEQ ID NO: 125693 - DNA, 38 bp, Artificial Sequence
  primer
gtaaaacgacggccagtatgctgcatgtagctggtagc

SEQ ID NO: 125694 - DNA, 38 bp, Artificial Sequence
  primer
gtaaaacgacggccagtaaatcttgccagcctacaagg

SEQ ID NO: 125695 - DNA, 38 bp, Artificial Sequence
  primer
gtaaaacgacggccagtatttgcatgtgagtgaacacg

SEQ ID NO: 125696 - DNA, 38 bp, Artificial Sequence
  primer
gtaaaacgacggccagtggatctttaatgggaaatcgg

SEQ ID NO: 125697 - DNA, 42 bp, Artificial Sequence
  primer
gtaaaacgacggccagtaaatgtagctagagtttgcttcagg

SEQ ID NO: 125698 - DNA, 41 bp, Artificial Sequence
  primer
gtaaaacgacggccagtcaacaaagaaagcagttactgacg

SEQ ID NO: 125699 - DNA, 30 bp, Artificial Sequence
  primer
tggttaccagttataacattaagactacca

SEQ ID NO: 125700 - DNA, 20 bp, Artificial Sequence
  primer
gacatggcacaacccaattc

SEQ ID NO: 125701 - DNA, 42 bp, Artificial Sequence
  primer
gtaaaacgacggccagtaggaatgcaatcatatcacacatag

SEQ ID NO: 125702 - DNA, 22 bp, Artificial Sequence
  primer
tccgactgtaacaccgtaaagg

SEQ ID NO: 125703 - DNA, 41 bp, Artificial Sequence
  primer
gtaaaacgacggccagtggaacaggataaagccagaaatac

SEQ ID NO: 125704 - DNA, 21 bp, Artificial Sequence
  primer
atggacaaactcatgcacacg

SEQ ID NO: 125705 - DNA, 39 bp, Artificial Sequence
  primer
gtaaaacgacggccagttgttaactgcacccaagttgtc

SEQ ID NO: 125706 - DNA, 39 bp, Artificial Sequence
  primer
gtaaaacgacggccagtgacacatccacttctgtagggc

SEQ ID NO: 125707 - DNA, 38 bp, Artificial Sequence
  primer
gtaaaacgacggccagtctgcacgtcacaactctcagg

SEQ ID NO: 125708 - DNA, 22 bp, Artificial Sequence
  primer
aaacaagttcatgcctttctgc

SEQ ID NO: 125709 - DNA, 40 bp, Artificial Sequence
  primer
gtaaaacgacggccagtccacaattggtcatagtgactcc

SEQ ID NO: 125710 - DNA, 40 bp, Artificial Sequence
  primer
gtaaaacgacggccagtcaaaggcggaactaaagataacc

SEQ ID NO: 125711 - DNA, 39 bp, Artificial Sequence
  primer
gtaaaacgacggccagtcaagtgaatgaatgccaaatcc

SEQ ID NO: 125712 - DNA, 37 bp, Artificial Sequence
  primer
gtaaaacgacggccagtaattgggatttgcttctggg

SEQ ID NO: 125713 - DNA, 38 bp, Artificial Sequence
  primer
gtaaaacgacggccagtttcatccgtgaatgagaaagg

SEQ ID NO: 125714 - DNA, 22 bp, Artificial Sequence
  primer
gggaaaccatttaacactgcac

SEQ ID NO: 125715 - DNA, 38 bp, Artificial Sequence
  primer
gtaaaacgacggccagtaagtccctgtggagcactctg

SEQ ID NO: 125716 - DNA, 38 bp, Artificial Sequence
  primer
gtaaaacgacggccagtcaggtgctccagataacgacc

SEQ ID NO: 125717 - DNA, 21 bp, Artificial Sequence
  primer
gggacacaagattgtggaatg

SEQ ID NO: 125718 - DNA, 38 bp, Artificial Sequence
  primer
gtaaaacgacggccagtggtgggcaggagatctatcag

SEQ ID NO: 125719 - DNA, 21 bp, Artificial Sequence
  primer
gtgaacatttgggagcctagc

SEQ ID NO: 125720 - DNA, 38 bp, Artificial Sequence
  primer
gtaaaacgacggccagtcactgccttattcagcccttc

SEQ ID NO: 125721 - DNA, 38 bp, Artificial Sequence
  primer
gtaaaacgacggccagtggcagtgcccaagtgtagttc

SEQ ID NO: 125722 - DNA, 21 bp, Artificial Sequence
  primer
gcttctcggtgactacactgc

SEQ ID NO: 125723 - DNA, 38 bp, Artificial Sequence
  primer
gtaaaacgacggccagtcaaatcagtagcagggtcagg

SEQ ID NO: 125724 - DNA, 36 bp, Artificial Sequence
  primer
gtaaaacgacggccagttggtagggctcccaacaac

SEQ ID NO: 125725 - DNA, 38 bp, Artificial Sequence
  primer
gtaaaacgacggccagttaaacaggctccactcacctg

SEQ ID NO: 125726 - DNA, 21 bp, Artificial Sequence
  primer
accagggtaggaatcagcttg

SEQ ID NO: 125727 - DNA, 24 bp, Artificial Sequence
  primer
tcaccaatcaaatagcttccatag

SEQ ID NO: 125728 - DNA, 37 bp, Artificial Sequence
  primer
gtaaaacgacggccagtgacaaggtgggctgactgag

SEQ ID NO: 125729 - DNA, 21 bp, Artificial Sequence
  primer
accagggtaggaatcagcttg

SEQ ID NO: 125730 - DNA, 39 bp, Artificial Sequence
  primer
gtaaaacgacggccagttgcttgggctacaggataaatg

SEQ ID NO: 125731 - DNA, 18 bp, Artificial Sequence
  primer
cgggacatggacagaggg

SEQ ID NO: 125732 - DNA, 21 bp, Artificial Sequence
  primer
gacttagctctgccatctccc

SEQ ID NO: 125733 - DNA, 21 bp, Artificial Sequence
  primer
tgtacaagcaggcatctgacc

SEQ ID NO: 125734 - DNA, 38 bp, Artificial Sequence
  primer
gtaaaacgacggccagtgagatctgatttgggcaggtc

SEQ ID NO: 125735 - DNA, 21 bp, Artificial Sequence
  primer
gtacatcccaagtaggcgagg

SEQ ID NO: 125736 - DNA, 21 bp, Artificial Sequence
  primer
ctcatcagcacagacacctgg

SEQ ID NO: 125737 - DNA, 21 bp, Artificial Sequence
  primer
agttcaaggctgtgattgcac

SEQ ID NO: 125738 - DNA, 21 bp, Artificial Sequence
  primer
ttcttaggcctcgtgttgagg

SEQ ID NO: 125739 - DNA, 23 bp, Artificial Sequence
  primer
aaccgggtagtatcgtctaatgc

SEQ ID NO: 125740 - DNA, 38 bp, Artificial Sequence
  primer
gtaaaacgacggccagtcatgccaccaaacaagtttct

SEQ ID NO: 125741 - DNA, 38 bp, Artificial Sequence
  primer
gtaaaacgacggccagtcctgagtcccagtaacccatc

SEQ ID NO: 125742 - DNA, 24 bp, Artificial Sequence
  primer
gctttccatctaattctcaaaggg

SEQ ID NO: 125743 - DNA, 38 bp, Artificial Sequence
  primer
gtaaaacgacggccagtaggtgtgaattaggcacctgg

SEQ ID NO: 125744 - DNA, 21 bp, Artificial Sequence
  primer
ggcttagtgcatattggcatc

SEQ ID NO: 125745 - DNA, 26 bp, Artificial Sequence
  primer
gccatggaaatagtcttgtatactcc

SEQ ID NO: 125746 - DNA, 39 bp, Artificial Sequence
  primer
gtaaaacgacggccagtggagctatggctaatgttcacc

SEQ ID NO: 125747 - DNA, 38 bp, Artificial Sequence
  primer
gtaaaacgacggccagtcaggtcgtatccttcaggagc

SEQ ID NO: 125748 - DNA, 38 bp, Artificial Sequence
  primer
gtaaaacgacggccagtaggacttagtgctgcagaggc

SEQ ID NO: 125749 - DNA, 21 bp, Artificial Sequence
  primer
aatactttccatttgacccgc

SEQ ID NO: 125750 - DNA, 38 bp, Artificial Sequence
  primer
gtaaaacgacggccagtcccaattctcagtccaaatgc

SEQ ID NO: 125751 - DNA, 20 bp, Artificial Sequence
  primer
acagagcgactccgtctcaa

SEQ ID NO: 125752 - DNA, 38 bp, Artificial Sequence
  primer
gtaaaacgacggccagttacattcaaccttctgcgagg

SEQ ID NO: 125753 - DNA, 38 bp, Artificial Sequence
  primer
gtaaaacgacggccagttccactaacagaggagcccag

SEQ ID NO: 125754 - DNA, 21 bp, Artificial Sequence
  primer
ctcctggtcagacagggaatc

SEQ ID NO: 125755 - DNA, 38 bp, Artificial Sequence
  primer
gtaaaacgacggccagtcatgtaccaattgcaaggctg

SEQ ID NO: 125756 - DNA, 37 bp, Artificial Sequence
  primer
gtaaaacgacggccagtctctctgcggtcaaggactc

SEQ ID NO: 125757 - DNA, 21 bp, Artificial Sequence
  primer
ctcaccactagggcagtgagg

SEQ ID NO: 125758 - DNA, 37 bp, Artificial Sequence
  primer
gtaaaacgacggccagtgtacttggacccgcaatctg

SEQ ID NO: 125759 - DNA, 37 bp, Artificial Sequence
  primer
gtaaaacgacggccagtgcaagggttagaggtctggg

SEQ ID NO: 125760 - DNA, 21 bp, Artificial Sequence
  primer
tccaaagtacccggctcatac

SEQ ID NO: 125761 - DNA, 21 bp, Artificial Sequence
  primer
taaattgatttgggctttccc

SEQ ID NO: 125762 - DNA, 21 bp, Artificial Sequence
  primer
cacaggtgagaaggtgcagag

SEQ ID NO: 125763 - DNA, 37 bp, Artificial Sequence; identical to SEQ ID NO: 125759
  primer

SEQ ID NO: 125764 - DNA, 41 bp, Artificial Sequence
  primer
gtaaaacgacggccagtcaagatgacaaactagttcttggg

SEQ ID NO: 125765 - DNA, 39 bp, Artificial Sequence
  primer
gtaaaacgacggccagtttccatttcctactggccttac

SEQ ID NO: 125766 - DNA, 24 bp, Artificial Sequence
  primer
aacttcctcaggatttgtatgtgg

SEQ ID NO: 125767 - DNA, 22 bp, Artificial Sequence
  primer
ggaggagtaaccttcattcagc

SEQ ID NO: 125768 - DNA, 21 bp, Artificial Sequence
  primer
ggactcaagtgatcctcccac

SEQ ID NO: 125769 - DNA, 18 bp, Artificial Sequence
  primer
gagccatgatcgcaccac

SEQ ID NO: 125770 - DNA, 21 bp, Artificial Sequence
  primer
gtgatttccaacaggcacatc

SEQ ID NO: 125771 - DNA, 21 bp, Artificial Sequence
  primer
cacatttcagttccttcaggg

SEQ ID NO: 125772 - DNA, 22 bp, Artificial Sequence
  primer
tttaaagtgacgaaagccagga

SEQ ID NO: 125773 - DNA, 22 bp, Artificial Sequence
  primer
aatctcagcacattcttgaggc

SEQ ID NO: 125774 - DNA, 20 bp, Artificial Sequence
  primer
tgcacatctggctcttctgg

SEQ ID NO: 125775 - DNA, 21 bp, Artificial Sequence
  primer
ctgtcaccgaaattctcctcc

SEQ ID NO: 125776 - DNA, 37 bp, Artificial Sequence
  primer
gtaaaacgacggccagttgagctggtggtactgagcc

SEQ ID NO: 125777 - DNA, 25 bp, Artificial Sequence
  primer
tttgaatgtggtttctaagttccag

SEQ ID NO: 125778 - DNA, 40 bp, Artificial Sequence
  primer
gtaaaacgacggccagtgagcgaaatgaagaggacactaa

SEQ ID NO: 125779 - DNA, 42 bp, Artificial Sequence
  primer
gtaaaacgacggccagtaacctcaggatactacaccgatttc

SEQ ID NO: 125780 - DNA, 21 bp, Artificial Sequence
  primer
ttccaggtagtgtgggaattg

SEQ ID NO: 125781 - DNA, 21 bp, Artificial Sequence
  primer
agactttgcctgagacttggc

SEQ ID NO: 125782 - DNA, 37 bp, Artificial Sequence
  primer
gtaaaacgacggccagtagagtgggcacttgctatgg

SEQ ID NO: 125783 - DNA, 21 bp, Artificial Sequence
  primer
aagggagaggaagtgaccacc

SEQ ID NO: 125784 - DNA, 20 bp, Artificial Sequence
  primer
ggtacagggacctcactgcc

SEQ ID NO: 125785 - DNA, 18 bp, Artificial Sequence
  primer
cacagatgacgccaaccc

SEQ ID NO: 125786 - DNA, 23 bp, Artificial Sequence
  primer
tcctgactggaacagaattcaac

SEQ ID NO: 125787 - DNA, 21 bp, Artificial Sequence
  primer
gactacgggcaacttgagagc

SEQ ID NO: 125788 - DNA, 21 bp, Artificial Sequence
  primer
cctaagaatgaagggtgctgg

SEQ ID NO: 125789 - DNA, 27 bp, Artificial Sequence
  primer
tttaaacctttgcattcttaaacaaac

SEQ ID NO: 125790 - DNA, 38 bp, Artificial Sequence
  primer
gtaaaacgacggccagtaaagagggcagtcagatgtca

SEQ ID NO: 125791 - DNA, 37 bp, Artificial Sequence
  primer
gtaaaacgacggccagttttagggacacaggcacagg

SEQ ID NO: 125792 - DNA, 41 bp, Artificial Sequence
  primer
gtaaaacgacggccagttgactactccagcacagacaactc

SEQ ID NO: 125793 - DNA, 21 bp, Artificial Sequence
  primer
aaagggaaatctgtcattggg

SEQ ID NO: 125794 - DNA, 38 bp, Artificial Sequence
  primer
gtaaaacgacggccagttgggagtgcaactctcaacac

SEQ ID NO: 125795 - DNA, 38 bp, Artificial Sequence
  primer
gtaaaacgacggccagtgcatctcaaagtacaagccca

SEQ ID NO: 125796 - DNA, 22 bp, Artificial Sequence
  primer
ttagaacgtgacatggtaaggc

SEQ ID NO: 125797 - DNA, 24 bp, Artificial Sequence
  primer
tgcaaccagatgattactatgcag

SEQ ID NO: 125798 - DNA, 38 bp, Artificial Sequence
  primer
gtaaaacgacggccagttgaccagcactgatgtaaccc

SEQ ID NO: 125799 - DNA, 40 bp, Artificial Sequence
  primer
gtaaaacgacggccagtcccatgttaaactacaagcaacc

SEQ ID NO: 125800 - DNA, 20 bp, Artificial Sequence
  primer
aggctcagcaggaaggaatc

SEQ ID NO: 125801 - DNA, 40 bp, Artificial Sequence; identical to SEQ ID NO: 125799
  primer

SEQ ID NO: 125802 - DNA, 25 bp, Artificial Sequence
  primer
ccgaaagtctggttataatgcctac

SEQ ID NO: 125803 - DNA, 25 bp, Artificial Sequence
  primer
ccgaaagtctggttataatgcctac

SEQ ID NO: 125804 - DNA, 20 bp, Artificial Sequence
  primer
cctggaaccaatttccaatg

SEQ ID NO: 125805 - DNA, 23 bp, Artificial Sequence
  primer
agctcaacagaattagcaccatc

SEQ ID NO: 125806 - DNA, 41 bp, Artificial Sequence
  primer
gtaaaacgacggccagtgcagcagttatctggcaaattatc

SEQ ID NO: 125807 - DNA, 21 bp, Artificial Sequence
  primer
tatcaggattggcaaaggacc

SEQ ID NO: 125808 - DNA, 23 bp, Artificial Sequence
  primer
gaaaccatcaagagactgttccc

SEQ ID NO: 125809 - DNA, 26 bp, Artificial Sequence
  primer
caacaaagaacagatgtccatttaac

SEQ ID NO: 125810 - DNA, 39 bp, Artificial Sequence
  primer
gtaaaacgacggccagttcctaagaccctgaatgattgc

SEQ ID NO: 125811 - DNA, 40 bp, Artificial Sequence
  primer
gtaaaacgacggccagtttgttctaatcgagactgcttgg

SEQ ID NO: 125812 - DNA, 20 bp, Artificial Sequence
  primer
catttccaaagtggtggtgg

SEQ ID NO: 125813 - DNA, 21 bp, Artificial Sequence
  primer
cccaggaatcaactatccctt

SEQ ID NO: 125814 - DNA, 21 bp, Artificial Sequence
  primer
ccctctttcttgctgaggttg

SEQ ID NO: 125815 - DNA, 21 bp, Artificial Sequence
  primer
ggtgtcaggacaaggtgtcag

SEQ ID NO: 125816 - DNA, 38 bp, Artificial Sequence
  primer
gtaaaacgacggccagttcctgacctcatgatctgctt

SEQ ID NO: 125817 - DNA, 38 bp, Artificial Sequence
  primer
gtaaaacgacggccagtggaggccagctaagggtttac

SEQ ID NO: 125818 - DNA, 38 bp, Artificial Sequence
  primer
gtaaaacgacggccagtcgtgatcctctgtcctcactc

SEQ ID NO: 125819 - DNA, 21 bp, Artificial Sequence
  primer
agcttgaggtgaggagagctt

SEQ ID NO: 125820 - DNA, 21 bp, Artificial Sequence
  primer
atgcacacttcttccatgagc

SEQ ID NO: 125821 - DNA, 21 bp, Artificial Sequence
  primer
gacagctgttgaatggatgga

SEQ ID NO: 125822 - DNA, 38 bp, Artificial Sequence
  primer
gtaaaacgacggccagtaggatgacctgaggagctagg

SEQ ID NO: 125823 - DNA, 21 bp, Artificial Sequence
  primer
cacgatgtctacagggagcag

SEQ ID NO: 125824 - DNA, 21 bp, Artificial Sequence
  primer
tctcctcctgacagcaaatcc

SEQ ID NO: 125825 - DNA, 21 bp, Artificial Sequence
  primer
attccacaaacgaaccagtcc

SEQ ID NO: 125826 - DNA, 18 bp, Artificial Sequence
  primer
gacgttgaggtgggcagg

SEQ ID NO: 125827 - DNA, 21 bp, Artificial Sequence
  primer
tggaggaaagcagagggttac

SEQ ID NO: 125828 - DNA, 37 bp, Artificial Sequence
  primer
gtaaaacgacggccagtagaaatgctgcctcacacag

SEQ ID NO: 125829 - DNA, 19 bp, Artificial Sequence
  primer
acgccaaatcccatcaaac

SEQ ID NO: 125830 - DNA, 21 bp, Artificial Sequence
  primer
aggtttgaattaaccggcagc

SEQ ID NO: 125831 - DNA, 21 bp, Artificial Sequence
  primer
gctgccaagattgagtggaag

SEQ ID NO: 125832 - DNA, 38 bp, Artificial Sequence
  primer
gtaaaacgacggccagtgtttgtgtatgcctctcccag

SEQ ID NO: 125833 - DNA, 38 bp, Artificial Sequence
  primer
gtaaaacgacggccagtatcttgccaggtaccaggttg

SEQ ID NO: 125834 - DNA, 38 bp, Artificial Sequence
  primer
gtaaaacgacggccagttgaaacatcccatttaccctg

SEQ ID NO: 125835 - DNA, 40 bp, Artificial Sequence
  primer
gtaaaacgacggccagtcagaaacctaccataggacctgg

SEQ ID NO: 125836 - DNA, 43 bp, Artificial Sequence
  primer
gtaaaacgacggccagttgatacacctagacaggactatctgc

SEQ ID NO: 125837 - DNA, 40 bp, Artificial Sequence
  primer
gtaaaacgacggccagtaaagggaaggtgaattcaatcag

SEQ ID NO: 125838 - DNA, 38 bp, Artificial Sequence
  primer
gtaaaacgacggccagtaaatgcttggctcttgattcc

SEQ ID NO: 125839 - DNA, 21 bp, Artificial Sequence
  primer
tctgcaaagtggtgctcaaac

SEQ ID NO: 125840 - DNA, 38 bp, Artificial Sequence
  primer
gtaaaacgacggccagtcagagtcacagtcccatcagg

SEQ ID NO: 125841 - DNA, 37 bp, Artificial Sequence
  primer
gtaaaacgacggccagtggacaagagaggaagcaggg

SEQ ID NO: 125842 - DNA, 19 bp, Artificial Sequence
  primer
tttcctctcagcacttccg

SEQ ID NO: 125843 - DNA, 24 bp, Artificial Sequence
  primer
gggataggacagtaatgtgacacg

SEQ ID NO: 125844 - DNA, 21 bp, Artificial Sequence
  primer
tgagctctgcagtttctctgc

SEQ ID NO: 125845 - DNA, 26 bp, Artificial Sequence
  primer
ggctgacccatttattagagctaaac

SEQ ID NO: 125846 - DNA, 38 bp, Artificial Sequence
  primer
gtaaaacgacggccagttccttccaaggatagccagag

SEQ ID NO: 125847 - DNA, 21 bp, Artificial Sequence
  primer
acagcctggtgacatagggag

SEQ ID NO: 125848 - DNA, 38 bp, Artificial Sequence
  primer
gtaaaacgacggccagtggactatagccatgtgccacc

SEQ ID NO: 125849 - DNA, 36 bp, Artificial Sequence
  primer
gtaaaacgacggccagtgcagtctgccacacctctg

SEQ ID NO: 125850 - DNA, 40 bp, Artificial Sequence
  primer
gtaaaacgacggccagttcaaagctcaagactggttcaag

SEQ ID NO: 125851 - DNA, 37 bp, Artificial Sequence
  primer
gtaaaacgacggccagtttcacattcttggctcctgg

SEQ ID NO: 125852 - DNA, 38 bp, Artificial Sequence
  primer
gtaaaacgacggccagtcagtgtctaccatcctccacg

SEQ ID NO: 125853 - DNA, 21 bp, Artificial Sequence
  primer
atgttcaccctttgccatacc

SEQ ID NO: 125854 - DNA, 41 bp, Artificial Sequence
  primer
gtaaaacgacggccagtaagccagctactgactggtacatc

SEQ ID NO: 125855 - DNA, 39 bp, Artificial Sequence
  primer
gtaaaacgacggccagtccacaacaccaggtgaatactg

SEQ ID NO: 125856 - DNA, 21 bp, Artificial Sequence
  primer
gtgtaggcctagaaactcggg

SEQ ID NO: 125857 - DNA, 40 bp, Artificial Sequence
  primer
gtaaaacgacggccagtcccattagcctctatgtaggacc

SEQ ID NO: 125858 - DNA, 20 bp, Artificial Sequence
  primer
tctccctcctcatccctttg

SEQ ID NO: 125859 - DNA, 39 bp, Artificial Sequence
  primer
gtaaaacgacggccagtagactcagggatctatccaccc

SEQ ID NO: 125860 - DNA, 21 bp, Artificial Sequence
  primer
aaggttatctcaatcccacgc

SEQ ID NO: 125861 - DNA, 21 bp, Artificial Sequence
  primer
ccctgaatgattccatgtgag

SEQ ID NO: 125862 - DNA, 38 bp, Artificial Sequence
  primer
gtaaaacgacggccagtcctgacatggagtctctgtgc

SEQ ID NO: 125863 - DNA, 21 bp, Artificial Sequence
  primer
gtgccattgtaggcttcttcc

SEQ ID NO: 125864 - DNA, 21 bp, Artificial Sequence
  primer
agctatcactgcaccctccag

SEQ ID NO: 125865 - DNA, 21 bp, Artificial Sequence
  primer
acaggcctctatcagggtgtg

SEQ ID NO: 125866 - DNA, 19 bp, Artificial Sequence
  primer
aggctgctgtcacctctgg

SEQ ID NO: 125867 - DNA, 38 bp, Artificial Sequence
  primer
gtaaaacgacggccagtaggaggtgatatctccgatgc

SEQ ID NO: 125868 - DNA, 20 bp, Artificial Sequence
  primer
ctctgactccacatcctggg

SEQ ID NO: 125869 - DNA, 20 bp, Artificial Sequence
  primer
ggagtaggtgaggcagccag

SEQ ID NO: 125870 - DNA, 38 bp, Artificial Sequence
  primer
gtaaaacgacggccagtgagtgaacgatcccagctttg

SEQ ID NO: 125871 - DNA, 21 bp, Artificial Sequence
  primer
aacaccagcaggtcaatctcc

SEQ ID NO: 125872 - DNA, 21 bp, Artificial Sequence
  primer
tagtggcggtcccagatgtag

SEQ ID NO: 125873 - DNA, 20 bp, Artificial Sequence
  primer
taagcatctccacctctccc

SEQ ID NO: 125874 - DNA, 19 bp, Artificial Sequence
  primer
cttccagcagcaggtcagg

SEQ ID NO: 125875 - DNA, 38 bp, Artificial Sequence; identical to SEQ ID NO: 125867
  primer

SEQ ID NO: 125876 - DNA, 21 bp, Artificial Sequence
  primer
aataccagacatccagccacc

SEQ ID NO: 125877 - DNA, 39 bp, Artificial Sequence
  primer
gtaaaacgacggccagtggcaggtccacaatactactgg

SEQ ID NO: 125878 - DNA, 24 bp, Artificial Sequence
  primer
cctccatttgtactcagattgtcc

SEQ ID NO: 125879 - DNA, 41 bp, Artificial Sequence
  primer
gtaaaacgacggccagtcataaactaaggtggcattcctct

SEQ ID NO: 125880 - DNA, 36 bp, Artificial Sequence
  primer
gtaaaacgacggccagtccctcattgtcaggcaacc

SEQ ID NO: 125881 - DNA, 42 bp, Artificial Sequence
  primer
gtaaaacgacggccagtcaatgtttaaaggtggtagctgttg

SEQ ID NO: 125882 - DNA, 39 bp, Artificial Sequence
  primer
gtaaaacgacggccagtttcggctcatctgaatgtgtag

SEQ ID NO: 125883 - DNA, 46 bp, Artificial Sequence
  primer
gtaaaacgacggccagtgaagaggagtgtcatattatacagtttgc

SEQ ID NO: 125884 - DNA, 19 bp, Artificial Sequence
  primer
cctcatgccattggctttc

SEQ ID NO: 125885 - DNA, 27 bp, Artificial Sequence
  primer
tttaagagcacactgtcactatttcag

SEQ ID NO: 125886 - DNA, 39 bp, Artificial Sequence
  primer
gtaaaacgacggccagtctggatcagcaatttgacagtg

SEQ ID NO: 125887 - DNA, 24 bp, Artificial Sequence
  primer
tgtgatgctaaggctccatatttc

SEQ ID NO: 125888 - DNA, 21 bp, Artificial Sequence
  primer
acatcctgcaccactgagaac

SEQ ID NO: 125889 - DNA, 21 bp, Artificial Sequence
  primer
tggcacacagttactctccaa

SEQ ID NO: 125890 - DNA, 38 bp, Artificial Sequence
  primer
gtaaaacgacggccagtaggtcaaggtggctttccttc

SEQ ID NO: 125891 - DNA, 21 bp, Artificial Sequence
  primer
tgagtgaaagcttggattccc

SEQ ID NO: 125892 - DNA, 21 bp, Artificial Sequence
  primer
tcactggtactcagagggtgg

SEQ ID NO: 125893 - DNA, 20 bp, Artificial Sequence
  primer
gtgaacatgtgtgtgtgccc

SEQ ID NO: 125894 - DNA, 38 bp, Artificial Sequence
  primer
gtaaaacgacggccagtgacttatggaggtaaggcccg

SEQ ID NO: 125895 - DNA, 21 bp, Artificial Sequence
  primer
ttcttctgtgcagggaagttg

SEQ ID NO: 125896 - DNA, 37 bp, Artificial Sequence
  primer
gtaaaacgacggccagtgggcagagctgttgagtgag

SEQ ID NO: 125897 - DNA, 21 bp, Artificial Sequence
  primer
catttccaagcctgtttcctc

SEQ ID NO: 125898 - DNA, 20 bp, Artificial Sequence
  primer
cccatagggtgcaatgtgtc

SEQ ID NO: 125899 - DNA, 21 bp, Artificial Sequence
  primer
ggaggctatgtttgagttggc

SEQ ID NO: 125900 - DNA, 38 bp, Artificial Sequence
  primer
gtaaaacgacggccagttccagctacgagagggacaag

SEQ ID NO: 125901 - DNA, 21 bp, Artificial Sequence
  primer
gaggaggatcaggcaacactc

SEQ ID NO: 125902 - DNA, 38 bp, Artificial Sequence
  primer
gtaaaacgacggccagtctattgagcccattgtcatgc

SEQ ID NO: 125903 - DNA, 20 bp, Artificial Sequence
  primer
gcagcctccagacctctagc

SEQ ID NO: 125904 - DNA, 19 bp, Artificial Sequence
  primer
atgtggctgggactccttg

SEQ ID NO: 125905 - DNA, 21 bp, Artificial Sequence
  primer
tgacagctatggctgcagttc

SEQ ID NO: 125906 - DNA, 21 bp, Artificial Sequence
  primer
agctgtagggagcctgacttg

SEQ ID NO: 125907 - DNA, 20 bp, Artificial Sequence
  primer
gtttcaagcccttctgggtc

SEQ ID NO: 125908 - DNA, 38 bp, Artificial Sequence
  primer
gtaaaacgacggccagtgtcatctccctcctgtccttg

SEQ ID NO: 125909 - DNA, 21 bp, Artificial Sequence
  primer
ctgcagctggagttgtttctc

SEQ ID NO: 125910 - DNA, 37 bp, Artificial Sequence
  primer
gtaaaacgacggccagtctccagtggcagcatctagg

SEQ ID NO: 125911 - DNA, 23 bp, Artificial Sequence
  primer
tgtgtatgtcactgtcttgtggg

SEQ ID NO: 125912 - DNA, 21 bp, Artificial Sequence
  primer
tcctaagaaccactcccaacc

SEQ ID NO: 125913 - DNA, 21 bp, Artificial Sequence
  primer
acaggtggaggaaggatgatg

SEQ ID NO: 125914 - DNA, 21 bp, Artificial Sequence
  primer
aagacggcctttccactaagg

SEQ ID NO: 125915 - DNA, 39 bp, Artificial Sequence
  primer
gtaaaacgacggccagtggacagtctaacacaggcaagg

SEQ ID NO: 125916 - DNA, 19 bp, Artificial Sequence
  primer
gtgccagatggctgagaac

SEQ ID NO: 125917 - DNA, 38 bp, Artificial Sequence
  primer
gtaaaacgacggccagtcactctcagtgcacgtcttca

SEQ ID NO: 125918 - DNA, 20 bp, Artificial Sequence
  primer
ttcaatgagccgagattgct

SEQ ID NO: 125919 - DNA, 38 bp, Artificial Sequence
  primer
gtaaaacgacggccagtgctccactacagagtccctgg

SEQ ID NO: 125920 - DNA, 38 bp, Artificial Sequence
  primer
gtaaaacgacggccagtgaaagacaaggcaaggtggag

SEQ ID NO: 125921 - DNA, 38 bp, Artificial Sequence
  primer
gtaaaacgacggccagtaaatgagaggccttgaatccc

SEQ ID NO: 125922 - DNA, 38 bp, Artificial Sequence
  primer
gtaaaacgacggccagtgtctggtaggctttccagtgt

SEQ ID NO: 125923 - DNA, 22 bp, Artificial Sequence
  primer
catgccacttaaccagtttcac

SEQ ID NO: 125924 - DNA, 21 bp, Artificial Sequence
  primer
ttcacctgtgtttgacttggc

SEQ ID NO: 125925 - DNA, 38 bp, Artificial Sequence
  primer
gtaaaacgacggccagttccttctcttcgaatccttgc

SEQ ID NO: 125926 - DNA, 22 bp, Artificial Sequence
  primer
tgtatgcagatcagcacctgag

SEQ ID NO: 125927 - DNA, 21 bp, Artificial Sequence
  primer
aggagctggagtccatcagag

SEQ ID NO: 125928 - DNA, 38 bp, Artificial Sequence
  primer
gtaaaacgacggccagttagggccagctggtgttaatg

SEQ ID NO: 125929 - DNA, 21 bp, Artificial Sequence
  primer
tctgtgccaggaaagtcagtc

SEQ ID NO: 125930 - DNA, 21 bp, Artificial Sequence
  primer
aaagtgtggaggacagggatg

SEQ ID NO: 125931 - DNA, 38 bp, Artificial Sequence
  primer
gtaaaacgacggccagtcaacgtactttgcgcttatgg

SEQ ID NO: 125932 - DNA, 38 bp, Artificial Sequence
  primer
gtaaaacgacggccagtctctgggtccaggaagtcatc

SEQ ID NO: 125933 - DNA, 21 bp, Artificial Sequence
  primer
gacagctccaagtctggtgtg

SEQ ID NO: 125934 - DNA, 38 bp, Artificial Sequence
  primer
gtaaaacgacggccagtgcaaatctgaagcttcgttcc

SEQ ID NO: 125935 - DNA, 21 bp, Artificial Sequence
  primer
tgacactcgggtcacacaaac

SEQ ID NO: 125936 - DNA, 20 bp, Artificial Sequence
  primer
ttcaggtccaagttccgaag

SEQ ID NO: 125937 - DNA, 38 bp, Artificial Sequence
  primer
gtaaaacgacggccagtgagacccttatctctgagccc

SEQ ID NO: 125938 - DNA, 21 bp, Artificial Sequence
  primer
gacctttcagccacaaagagg

SEQ ID NO: 125939 - DNA, 21 bp, Artificial Sequence
  primer
cagagcctaagggcctctctc

SEQ ID NO: 125940 - DNA, 21 bp, Artificial Sequence
  primer
ttagtgcctgcacagagatgg

SEQ ID NO: 125941 - DNA, 21 bp, Artificial Sequence
  primer
tggttgcaggtcgtatgtttc

SEQ ID NO: 125942 - DNA, 21 bp, Artificial Sequence
  primer
tctgggatcaggaccaggtag

SEQ ID NO: 125943 - DNA, 38 bp, Artificial Sequence
  primer
gtaaaacgacggccagtcgaaagccacagaggagtagg

SEQ ID NO: 125944 - DNA, 35 bp, Artificial Sequence
  primer
gtaaaacgacggccagtcaccctggtttgaggtcg

SEQ ID NO: 125945 - DNA, 38 bp, Artificial Sequence
  primer
gtaaaacgacggccagttacacactgctccaggaaggg

SEQ ID NO: 125946 - DNA, 38 bp, Artificial Sequence
  primer
gtaaaacgacggccagtctgtcttggccatcactaggc

SEQ ID NO: 125947 - DNA, 20 bp, Artificial Sequence
  primer
aggtgcccatgaagtcgaag

SEQ ID NO: 125948 - DNA, 22 bp, Artificial Sequence
  primer
aacttagtgcgactccgttctg

SEQ ID NO: 125949 - DNA, 37 bp, Artificial Sequence
  primer
gtaaaacgacggccagtacagtcacccggttcagttg

SEQ ID NO: 125950 - DNA, 37 bp, Artificial Sequence
  primer
gtaaaacgacggccagtccagttgccacttccgatac

SEQ ID NO: 125951 - DNA, 21 bp, Artificial Sequence
  primer
tcccaggtgtgtaactgaacc

SEQ ID NO: 125952 - DNA, 21 bp, Artificial Sequence
  primer
catcgaaggtggtgtagtggg

SEQ ID NO: 125953 - DNA, 38 bp, Artificial Sequence
  primer
gtaaaacgacggccagttgactggcatcttctgtcctc

SEQ ID NO: 125954 - DNA, 38 bp, Artificial Sequence
  primer
gtaaaacgacggccagtcccacagaactcctccttctg

SEQ ID NO: 125955 - DNA, 20 bp, Artificial Sequence
  primer
cgtagtgactgttcggaggg

SEQ ID NO: 125956 - DNA, 38 bp, Artificial Sequence
  primer
gtaaaacgacggccagtagctatggtacccttgccctc

SEQ ID NO: 125957 - DNA, 21 bp, Artificial Sequence
  primer
ctttagtcctgtgcacctccc

SEQ ID NO: 125958 - DNA, 21 bp, Artificial Sequence
  primer
aaatgggagaaagcgagacac

SEQ ID NO: 125959 - DNA, 37 bp, Artificial Sequence
  primer
gtaaaacgacggccagtcttggaaattgaatcggtgc

SEQ ID NO: 125960 - DNA, 22 bp, Artificial Sequence
  primer
cgtacactctgacccttccatc

SEQ ID NO: 125961 - DNA, 37 bp, Artificial Sequence
  primer
gtaaaacgacggccagtagggcagggagagaccctac

SEQ ID NO: 125962 - DNA, 38 bp, Artificial Sequence
  primer
gtaaaacgacggccagtgtctggcccagtgggtagtag

SEQ ID NO: 125963 - DNA, 37 bp, Artificial Sequence
  primer
gtaaaacgacggccagtcacccaggcagagatcaaag

SEQ ID NO: 125964 - DNA, 38 bp, Artificial Sequence
  primer
gtaaaacgacggccagtctccagtctgggtgacaagag

SEQ ID NO: 125965 - DNA, 20 bp, Artificial Sequence
  primer
cagttacactacccgcagcc

SEQ ID NO: 125966 - DNA, 21 bp, Artificial Sequence
  primer
aggtgccttggaaatcgaatc

SEQ ID NO: 125967 - DNA, 38 bp, Artificial Sequence; identical to SEQ ID NO: 125954
  primer

SEQ ID NO: 125968 - DNA, 21 bp, Artificial Sequence
  primer
ggtgacaagagtgagaccctg

SEQ ID NO: 125969 - DNA, 21 bp, Artificial Sequence
  primer
ttccctaagggtccctacctc

SEQ ID NO: 125970 - DNA, 38 bp, Artificial Sequence
  primer
gtaaaacgacggccagttcccagtaacagggtgacatt

SEQ ID NO: 125971 - DNA, 38 bp, Artificial Sequence
  primer
gtaaaacgacggccagtacacagcccttgaagaagctc

SEQ ID NO: 125972 - DNA, 21 bp, Artificial Sequence
  primer
ggaccagagtgaaaccaaacc

SEQ ID NO: 125973 - DNA, 21 bp, Artificial Sequence
  primer
tgacagtgaagttctcagccc

SEQ ID NO: 125974 - DNA, 21 bp, Artificial Sequence
  primer
ggctcatgtcactgactcctc

SEQ ID NO: 125975 - DNA, 37 bp, Artificial Sequence
  primer
gtaaaacgacggccagtatggcttggacacacattcc

SEQ ID NO: 125976 - DNA, 38 bp, Artificial Sequence
  primer
gtaaaacgacggccagtccaagctcagaggaaggaaag

SEQ ID NO: 125977 - DNA, 21 bp, Artificial Sequence
  primer
acctcgcccagtgggtagtag

SEQ ID NO: 125978 - DNA, 21 bp, Artificial Sequence
  primer
cccatgttagaggaatgtccc

SEQ ID NO: 125979 - DNA, 21 bp, Artificial Sequence
  primer
attggcggaagtactcagagg

SEQ ID NO: 125980 - DNA, 38 bp, Artificial Sequence
  primer
gtaaaacgacggccagtcaaatagaaggaatgggccag

SEQ ID NO: 125981 - DNA, 21 bp, Artificial Sequence
  primer
gcctgcatcaagtcacatagc

SEQ ID NO: 125982 - DNA, 38 bp, Artificial Sequence
  primer
gtaaaacgacggccagtagaaaggaagccaggaatgtg

SEQ ID NO: 125983 - DNA, 21 bp, Artificial Sequence
  primer
ctaaacacccaccctgactgc

SEQ ID NO: 125984 - DNA, 21 bp, Artificial Sequence
  primer
ctgtgcaggaggaaagtcagg

SEQ ID NO: 125985 - DNA, 38 bp, Artificial Sequence
  primer
gtaaaacgacggccagtgcagtttacctctctggagcc

SEQ ID NO: 125986 - DNA, 21 bp, Artificial Sequence
  primer
ccttgaacaaacctcagtccc

SEQ ID NO: 125987 - DNA, 20 bp, Artificial Sequence
  primer
gcctgctccttaccacactg

SEQ ID NO: 125988 - DNA, 21 bp, Artificial Sequence
  primer
taagaagcaaatcccagaccc

SEQ ID NO: 125989 - DNA, 21 bp, Artificial Sequence
  primer
tttcctgcaaacctctgtctg

SEQ ID NO: 125990 - DNA, 20 bp, Artificial Sequence
  primer
gtaggcccatgtgacctcag

SEQ ID NO: 125991 - DNA, 38 bp, Artificial Sequence
  primer
gtaaaacgacggccagtctagccctaagagcgggattc

SEQ ID NO: 125992 - DNA, 21 bp, Artificial Sequence
  primer
tagttggctgcttacgattgg

SEQ ID NO: 125993 - DNA, 21 bp, Artificial Sequence
  primer
gctatttctaagggccaggtg

SEQ ID NO: 125994 - DNA, 38 bp, Artificial Sequence
  primer
gtaaaacgacggccagtctgcaaacctctgcctgaaag

SEQ ID NO: 125995 - DNA, 21 bp, Artificial Sequence
  primer
caaagccagcagagtcatcag

SEQ ID NO: 125996 - DNA, 22 bp, Artificial Sequence
  primer
aggaaggaggagagtggaagag

SEQ ID NO: 125997 - DNA, 38 bp, Artificial Sequence; identical to SEQ ID NO: 125994
  primer

SEQ ID NO: 125998 - DNA, 37 bp, Artificial Sequence
  primer
gtaaaacgacggccagtgtaggcccatgtgacctcag

SEQ ID NO: 125999 - DNA, 38 bp, Artificial Sequence
  primer
gtaaaacgacggccagtgagagggattctggcaatgtc

SEQ ID NO: 126000 - DNA, 22 bp, Artificial Sequence
  primer
cgggtgcatgagaagtgaatag

SEQ ID NO: 126001 - DNA, 21 bp, Artificial Sequence
  primer
gaactgcagcatctccctgtc

SEQ ID NO: 126002 - DNA, 38 bp, Artificial Sequence
  primer
gtaaaacgacggccagtagagaggtcgtctttaggccc

SEQ ID NO: 126003 - DNA, 21 bp, Artificial Sequence
  primer
gctttctggagtgaatggctg

SEQ ID NO: 126004 - DNA, 21 bp, Artificial Sequence
  primer
cctaggagctcaatccacagc

SEQ ID NO: 126005 - DNA, 39 bp, Artificial Sequence
  primer
gtaaaacgacggccagttgtgttggaggaactatccctg

SEQ ID NO: 126006 - DNA, 21 bp, Artificial Sequence
  primer
gggaccacacatcatctcatc

SEQ ID NO: 126007 - DNA, 21 bp, Artificial Sequence
  primer
tcaacttcccagtgtgattgc

SEQ ID NO: 126008 - DNA, 39 bp, Artificial Sequence
  primer
gtaaaacgacggccagttttcctgctgcttgtagagagg

SEQ ID NO: 126009 - DNA, 21 bp, Artificial Sequence
  primer
ttaattgagcggagaaggcag

SEQ ID NO: 126010 - DNA, 21 bp, Artificial Sequence
  primer
cctgcagagtgtagggacctg

SEQ ID NO: 126011 - DNA, 18 bp, Artificial Sequence
  primer
ctgatggagggtcctggc

SEQ ID NO: 126012 - DNA, 38 bp, Artificial Sequence
  primer
gtaaaacgacggccagtggaaggtcagactcaggaagg

SEQ ID NO: 126013 - DNA, 20 bp, Artificial Sequence
  primer
ggtctctgtcctcccaggtc

SEQ ID NO: 126014 - DNA, 37 bp, Artificial Sequence
  primer
gtaaaacgacggccagtgacaactaggcccagaaccc

SEQ ID NO: 126015 - DNA, 38 bp, Artificial Sequence
  primer
gtaaaacgacggccagtgattcaaacccagcctgactc

SEQ ID NO: 126016 - DNA, 38 bp, Artificial Sequence
  primer
gtaaaacgacggccagtgggttgagaatcggtcatttc

SEQ ID NO: 126017 - DNA, 22 bp, Artificial Sequence
  primer
tctacatgcaccgagtgtgaag

SEQ ID NO: 126018 - DNA, 20 bp, Artificial Sequence
  primer
atccgcaggttataaagccc

SEQ ID NO: 126019 - DNA, 21 bp, Artificial Sequence
  primer
ctctgggatgtgtttccactc

SEQ ID NO: 126020 - DNA, 22 bp, Artificial Sequence
  primer
gggatttctgcagtccataacc

SEQ ID NO: 126021 - DNA, 38 bp, Artificial Sequence
  primer
gtaaaacgacggccagtgggtgtgtaactggtcaaggc

SEQ ID NO: 126022 - DNA, 21 bp, Artificial Sequence
  primer
gagagctggacttgtcagcag

SEQ ID NO: 126023 - DNA, 38 bp, Artificial Sequence
  primer
gtaaaacgacggccagtgagcactgtgagcctcctttc

SEQ ID NO: 126024 - DNA, 37 bp, Artificial Sequence
  primer
gtaaaacgacggccagtgggacttctgggatagcctg

SEQ ID NO: 126025 - DNA, 21 bp, Artificial Sequence
  primer
gcagggacattattcacaccc

SEQ ID NO: 126026 - DNA, 21 bp, Artificial Sequence
  primer
ggcttcatccacaaaggagac

SEQ ID NO: 126027 - DNA, 21 bp, Artificial Sequence
  primer
cccatagcctcccttccttag

SEQ ID NO: 126028 - DNA, 38 bp, Artificial Sequence
  primer
gtaaaacgacggccagtatggattcaagcctaagcgag

SEQ ID NO: 126029 - DNA, 19 bp, Artificial Sequence
  primer
atgacgtcaactcccagcc

SEQ ID NO: 126030 - DNA, 38 bp, Artificial Sequence
  primer
gtaaaacgacggccagtattggcctaactctgcaatgg

SEQ ID NO: 126031 - DNA, 19 bp, Artificial Sequence
  primer
ctggctgtgtctccagcag

SEQ ID NO: 126032 - DNA, 21 bp, Artificial Sequence
  primer
gacaatcttggctgtgagtgc

SEQ ID NO: 126033 - DNA, 21 bp, Artificial Sequence
  primer
tgaatataggctccaggctcg

SEQ ID NO: 126034 - DNA, 21 bp, Artificial Sequence
  primer
cacttggctcagtgttcaagg

SEQ ID NO: 126035 - DNA, 20 bp, Artificial Sequence
  primer
gggaactcagagtccggaag

SEQ ID NO: 126036 - DNA, 21 bp, Artificial Sequence
  primer
actgcctactccctccagctc

SEQ ID NO: 126037 - DNA, 38 bp, Artificial Sequence
  primer
gtaaaacgacggccagtatcaatgcatcagggagaagg

SEQ ID NO: 126038 - DNA, 37 bp, Artificial Sequence
  primer
gtaaaacgacggccagttcctcaatgcccatacttgc

SEQ ID NO: 126039 - DNA, 38 bp, Artificial Sequence
  primer
gtaaaacgacggccagtcacccacctatctttcccaag

SEQ ID NO: 126040 - DNA, 21 bp, Artificial Sequence
  primer
cgcaaaggatacttcctggag

SEQ ID NO: 126041 - DNA, 21 bp, Artificial Sequence
  primer
gagtccctataggctggcgac

SEQ ID NO: 126042 - DNA, 38 bp, Artificial Sequence
  primer
gtaaaacgacggccagtagccactatacagccctcagc

SEQ ID NO: 126043 - DNA, 25 bp, Artificial Sequence
  primer
tgactgattcagcaagttcaattat

SEQ ID NO: 126044 - DNA, 22 bp, Artificial Sequence
  primer
ccagagttcctgcaacttcttc

SEQ ID NO: 126045 - DNA, 41 bp, Artificial Sequence
  primer
gtaaaacgacggccagtgggtaatcactaggactgtaaggc

SEQ ID NO: 126046 - DNA, 21 bp, Artificial Sequence
  primer
gtaccaatgccctcagtttcc

SEQ ID NO: 126047 - DNA, 22 bp, Artificial Sequence
  primer
tttgaattatcatcctcggtgg

SEQ ID NO: 126048 - DNA, 20 bp, Artificial Sequence
  primer
acccacatgatcttcaaggc

SEQ ID NO: 126049 - DNA, 41 bp, Artificial Sequence
  primer
gtaaaacgacggccagtcagtccctccttatttgttcaatg

SEQ ID NO: 126050 - DNA, 38 bp, Artificial Sequence
  primer
gtaaaacgacggccagtccagaggaattggcaaatgta

SEQ ID NO: 126051 - DNA, 42 bp, Artificial Sequence
  primer
gtaaaacgacggccagtcaactcaaatgtgttaggtttgtcc

SEQ ID NO: 126052 - DNA, 39 bp, Artificial Sequence
  primer
gtaaaacgacggccagttcaaatgacaaacaaggaacca

SEQ ID NO: 126053 - DNA, 39 bp, Artificial Sequence
  primer
gtaaaacgacggccagttgtttgaccagacacaggtagg

SEQ ID NO: 126054 - DNA, 26 bp, Artificial Sequence
  primer
aaatgttaatactgggaacctaattt

SEQ ID NO: 126055 - DNA, 26 bp, Artificial Sequence
  primer
tgtctctcagctctacaggaaataat

SEQ ID NO: 126056 - DNA, 18 bp, Artificial Sequence
  primer
gggcagggagcataaagg

SEQ ID NO: 126057 - DNA, 24 bp, Artificial Sequence
  primer
tgaaatgcctagaaataacatgcc

SEQ ID NO: 126058 - DNA, 38 bp, Artificial Sequence
  primer
gtaaaacgacggccagttcctggacaatgtcgtgtctc

SEQ ID NO: 126059 - DNA, 24 bp, Artificial Sequence
  primer
aactcattcttaacggtgctaacc

SEQ ID NO: 126060 - DNA, 24 bp, Artificial Sequence
  primer
gaatgcaatcatcaaatgactacc

SEQ ID NO: 126061 - DNA, 35 bp, Artificial Sequence
  primer
gtaaaacgacggccagttcaagcaatccacctgcc

SEQ ID NO: 126062 - DNA, 42 bp, Artificial Sequence
  primer
gtaaaacgacggccagttctccactggcttataaacagattt

SEQ ID NO: 126063 - DNA, 26 bp, Artificial Sequence
  primer
ttacagaacttgggttctagaagttg

SEQ ID NO: 126064 - DNA, 20 bp, Artificial Sequence
  primer
gcctggcaacaaagctagac

SEQ ID NO: 126065 - DNA, 22 bp, Artificial Sequence
  primer
gcaccttgtaccaagggttaaa

SEQ ID NO: 126066 - DNA, 24 bp, Artificial Sequence
  primer
tgcgatttaatgtttgtagtcagc

SEQ ID NO: 126067 - DNA, 20 bp, Artificial Sequence
  primer
tccgacttcccgtctcctac

SEQ ID NO: 126068 - DNA, 38 bp, Artificial Sequence
  primer
gtaaaacgacggccagtcctgtgtgtttatgtgggtgg

SEQ ID NO: 126069 - DNA, 38 bp, Artificial Sequence
  primer
gtaaaacgacggccagtagcagggatctgacaccagtc

SEQ ID NO: 126070 - DNA, 21 bp, Artificial Sequence
  primer
tctacctacagctcacgtgcc

SEQ ID NO: 126071 - DNA, 21 bp, Artificial Sequence
  primer
tgggatgcatacacaaagtcc

SEQ ID NO: 126072 - DNA, 21 bp, Artificial Sequence
  primer
gcctgtgcagatgagagaaag

SEQ ID NO: 126073 - DNA, 38 bp, Artificial Sequence
  primer
gtaaaacgacggccagttaaccaaggttacccacccag

SEQ ID NO: 126074 - DNA, 20 bp, Artificial Sequence
  primer
agccagctaggagcagaacc

SEQ ID NO: 126075 - DNA, 38 bp, Artificial Sequence
  primer
gtaaaacgacggccagtcaaccctgtccctagcacttc

SEQ ID NO: 126076 - DNA, 21 bp, Artificial Sequence
  primer
tgaaaggtggactgaggtgtg

SEQ ID NO: 126077 - DNA, 19 bp, Artificial Sequence
  primer
tcaatggctccaagatccc

SEQ ID NO: 126078 - DNA, 21 bp, Artificial Sequence
  primer
tcctcccaccatcagaaagag

SEQ ID NO: 126079 - DNA, 21 bp, Artificial Sequence
  primer
ggagtggctggtactcaaagc

SEQ ID NO: 126080 - DNA, 21 bp, Artificial Sequence
  primer
ctccgtgattgtcagctcatc

SEQ ID NO: 126081 - DNA, 38 bp, Artificial Sequence
  primer
gtaaaacgacggccagtactcaggcttctagctttgcc

SEQ ID NO: 126082 - DNA, 21 bp, Artificial Sequence
  primer
tgtgccaggaatgctacagag

SEQ ID NO: 126083 - DNA, 21 bp, Artificial Sequence
  primer
gggagcagaggaggcattaag

SEQ ID NO: 126084 - DNA, 21 bp, Artificial Sequence
  primer
acacttggagatgacagagcg

SEQ ID NO: 126085 - DNA, 20 bp, Artificial Sequence
  primer
cctgtctattccctcagccc

SEQ ID NO: 126086 - DNA, 38 bp, Artificial Sequence
  primer
gtaaaacgacggccagtcagctctagaaatgggaaggg

SEQ ID NO: 126087 - DNA, 41 bp, Artificial Sequence
  primer
gtaaaacgacggccagttgtcacctgccttctttaagtttc

SEQ ID NO: 126088 - DNA, 39 bp, Artificial Sequence
  primer
gtaaaacgacggccagttcaaccagaaacatatgggacc

SEQ ID NO: 126089 - DNA, 38 bp, Artificial Sequence
  primer
gtaaaacgacggccagtccactacctgagaatgggtcc

SEQ ID NO: 126090 - DNA, 38 bp, Artificial Sequence
  primer
gtaaaacgacggccagtccaccctcaaagatccaattc

SEQ ID NO: 126091 - DNA, 21 bp, Artificial Sequence
  primer
caatcccataaacccaacacc

SEQ ID NO: 126092 - DNA, 43 bp, Artificial Sequence
  primer
gtaaaacgacggccagtaatttgttcgttaatgcattcttcta

SEQ ID NO: 126093 - DNA, 21 bp, Artificial Sequence
  primer
tctgtctgtctatgccaaggg

SEQ ID NO: 126094 - DNA, 38 bp, Artificial Sequence
  primer
gtaaaacgacggccagtatgttcacaccactgcccttc

SEQ ID NO: 126095 - DNA, 38 bp, Artificial Sequence
  primer
gtaaaacgacggccagtcacgaatgaagacggtgaatc

SEQ ID NO: 126096 - DNA, 21 bp, Artificial Sequence
  primer
tctctttcacttcccgcaata

SEQ ID NO: 126097 - DNA, 25 bp, Artificial Sequence
  primer
tgctaagtacagcttgagagactgg

SEQ ID NO: 126098 - DNA, 21 bp, Artificial Sequence
  primer
ccaactttatttcgagcctgg

SEQ ID NO: 126099 - DNA, 38 bp, Artificial Sequence
  primer
gtaaaacgacggccagtactgaaggcttactccagggc

SEQ ID NO: 126100 - DNA, 19 bp, Artificial Sequence
  primer
gatccacagaccctttggg

SEQ ID NO: 126101 - DNA, 21 bp, Artificial Sequence
  primer
aggaattggttgctatgagcc

SEQ ID NO: 126102 - DNA, 38 bp, Artificial Sequence
  primer
gtaaaacgacggccagtacccagttcatccttgtttgg

SEQ ID NO: 126103 - DNA, 21 bp, Artificial Sequence
  primer
gccacccagtcacacataatc

SEQ ID NO: 126104 - DNA, 38 bp, Artificial Sequence
  primer
gtaaaacgacggccagttcgcaaagatgcaagaatttg

SEQ ID NO: 126105 - DNA, 20 bp, Artificial Sequence
  primer
ccacccaccacacaaggtag

SEQ ID NO: 126106 - DNA, 42 bp, Artificial Sequence
  primer
gtaaaacgacggccagtccctatttgccttagtgattagttg

SEQ ID NO: 126107 - DNA, 21 bp, Artificial Sequence
  primer
ttgttgaaggacatttgggtg

SEQ ID NO: 126108 - DNA, 21 bp, Artificial Sequence
  primer
ggcagaagccagtgctaaatc

SEQ ID NO: 126109 - DNA, 23 bp, Artificial Sequence
  primer
ggaaatcaatagatccttgctgc

SEQ ID NO: 126110 - DNA, 38 bp, Artificial Sequence
  primer
gtaaaacgacggccagtaggcttctgctgaactcatcc

SEQ ID NO: 126111 - DNA, 38 bp, Artificial Sequence
  primer
gtaaaacgacggccagtacttcctcctcacaaaccgtc

SEQ ID NO: 126112 - DNA, 23 bp, Artificial Sequence
  primer
tgtaacctagcattgtatgtggc

SEQ ID NO: 126113 - DNA, 38 bp, Artificial Sequence
  primer
gtaaaacgacggccagtgcagacagacctggtgacatc

SEQ ID NO: 126114 - DNA, 20 bp, Artificial Sequence
  primer
gtgttgcccaactctgcatc

SEQ ID NO: 126115 - DNA, 22 bp, Artificial Sequence
  primer
tccctccctcatttcattacag

SEQ ID NO: 126116 - DNA, 38 bp, Artificial Sequence
  primer
gtaaaacgacggccagtgtagacaccagggtttgagcc

SEQ ID NO: 126117 - DNA, 21 bp, Artificial Sequence
  primer
gtagagcccaggttgtcatgg

SEQ ID NO: 126118 - DNA, 23 bp, Artificial Sequence
  primer
ccagagtgtgttctacaaccagg

SEQ ID NO: 126119 - DNA, 21 bp, Artificial Sequence
  primer
aggtgcttatgttgcagatgg

SEQ ID NO: 126120 - DNA, 39 bp, Artificial Sequence
  primer
gtaaaacgacggccagtaatgggattcagagagaggagg

SEQ ID NO: 126121 - DNA, 20 bp, Artificial Sequence
  primer
gtcatgggagtgtgtctggc

SEQ ID NO: 126122 - DNA, 21 bp, Artificial Sequence
  primer
tctcgttagacgatgctccac

SEQ ID NO: 126123 - DNA, 21 bp, Artificial Sequence
  primer
ctccatgtcagaaccctgttg

SEQ ID NO: 126124 - DNA, 39 bp, Artificial Sequence
  primer
gtaaaacgacggccagtcagactgagaacccacacacac

SEQ ID NO: 126125 - DNA, 38 bp, Artificial Sequence
  primer
gtaaaacgacggccagtcgtcgtatgaccctggacttc

SEQ ID NO: 126126 - DNA, 21 bp, Artificial Sequence
  primer
ttccagagtgtgttctcccac

SEQ ID NO: 126127 - DNA, 37 bp, Artificial Sequence
  primer
gtaaaacgacggccagtgaggctcttgtgttccaggc

SEQ ID NO: 126128 - DNA, 21 bp, Artificial Sequence
  primer
cttccacaaggctaccaggac

SEQ ID NO: 126129 - DNA, 21 bp, Artificial Sequence
  primer
tttacaaaccgtagggccaag

SEQ ID NO: 126130 - DNA, 21 bp, Artificial Sequence
  primer
agattcccactgtcaggatgc

SEQ ID NO: 126131 - DNA, 21 bp, Artificial Sequence
  primer
ggcacagagtaggttccttgc

SEQ ID NO: 126132 - DNA, 21 bp, Artificial Sequence
  primer
ctaatccttcccactcctccc

SEQ ID NO: 126133 - DNA, 20 bp, Artificial Sequence
  primer
gaccctcttggctccttcag

SEQ ID NO: 126134 - DNA, 38 bp, Artificial Sequence
  primer
gtaaaacgacggccagtcctctaggaaatgccttgctc

SEQ ID NO: 126135 - DNA, 37 bp, Artificial Sequence
  primer
gtaaaacgacggccagtagtcttccagctctacccgc

SEQ ID NO: 126136 - DNA, 21 bp, Artificial Sequence
  primer
actgttgcaccatcctgtttc

SEQ ID NO: 126137 - DNA, 21 bp, Artificial Sequence
  primer
ctggaagagtcttgaaagggc

SEQ ID NO: 126138 - DNA, 40 bp, Artificial Sequence
  primer
gtaaaacgacggccagtaagaagtccttacagcccttcag

SEQ ID NO: 126139 - DNA, 38 bp, Artificial Sequence
  primer
gtaaaacgacggccagtacgtgtcaggtgcagagactg

SEQ ID NO: 126140 - DNA, 39 bp, Artificial Sequence
  primer
gtaaaacgacggccagtcccataacagtgaggattagcc

SEQ ID NO: 126141 - DNA, 21 bp, Artificial Sequence
  primer
aaactcataatccctgcccac

SEQ ID NO: 126142 - DNA, 18 bp, Artificial Sequence
  primer
aagcacagtggcaccagc

SEQ ID NO: 126143 - DNA, 38 bp, Artificial Sequence
  primer
gtaaaacgacggccagtggcagaaacataggcaaggtg

SEQ ID NO: 126144 - DNA, 21 bp, Artificial Sequence
  primer
gttcaaagttgccagtgggag

SEQ ID NO: 126145 - DNA, 21 bp, Artificial Sequence
  primer
gtagcagaggctagggcacag

SEQ ID NO: 126146 - DNA, 21 bp, Artificial Sequence
  primer
ctgaggaatgctgttgtctgc

SEQ ID NO: 126147 - DNA, 21 bp, Artificial Sequence
  primer
tacctccattgctttgggatg

SEQ ID NO: 126148 - DNA, 20 bp, Artificial Sequence
  primer
tggagaatggcatccagaag

SEQ ID NO: 126149 - DNA, 20 bp, Artificial Sequence
  primer
catttggagcctcttggttg

SEQ ID NO: 126150 - DNA, 21 bp, Artificial Sequence
  primer
tctgcaagtgtttccttcctg

SEQ ID NO: 126151 - DNA, 21 bp, Artificial Sequence
  primer
gcctaggatccctgcattaac

SEQ ID NO: 126152 - DNA, 21 bp, Artificial Sequence
  primer
cagaaggaaccatctccctcc

SEQ ID NO: 126153 - DNA, 39 bp, Artificial Sequence
  primer
gtaaaacgacggccagtccagaatagctggacactcctc

SEQ ID NO: 126154 - DNA, 22 bp, Artificial Sequence
  primer
ggagaccttagtggctgacaga

SEQ ID NO: 126155 - DNA, 37 bp, Artificial Sequence
  primer
gtaaaacgacggccagtcagcaaatagcccagtggag

SEQ ID NO: 126156 - DNA, 20 bp, Artificial Sequence
  primer
aagccttcgtgtgcatgttc

SEQ ID NO: 126157 - DNA, 21 bp, Artificial Sequence
  primer
agggcctagtacttggaaggg

SEQ ID NO: 126158 - DNA, 21 bp, Artificial Sequence
  primer
tggtcaagtctctgctggaac

SEQ ID NO: 126159 - DNA, 21 bp, Artificial Sequence
  primer
aaatcgggttgctatctccag

SEQ ID NO: 126160 - DNA, 38 bp, Artificial Sequence
  primer
gtaaaacgacggccagtaatttatgggatcatggtggc

SEQ ID NO: 126161 - DNA, 21 bp, Artificial Sequence
  primer
ttcatcatcttcttcatgggc

SEQ ID NO: 126162 - DNA, 21 bp, Artificial Sequence
  primer
ggagagatggatgatgtgtgg

SEQ ID NO: 126163 - DNA, 21 bp, Artificial Sequence
  primer
agcttgaaaggaagagggacc

SEQ ID NO: 126164 - DNA, 20 bp, Artificial Sequence
  primer
ctccttgcagacccacagac

SEQ ID NO: 126165 - DNA, 21 bp, Artificial Sequence
  primer
ccagtacgattcgagctcctc

SEQ ID NO: 126166 - DNA, 35 bp, Artificial Sequence
  primer
gtaaaacgacggccagtgtgttccggacggaggtg

SEQ ID NO: 126167 - DNA, 22 bp, Artificial Sequence
  primer
cactgaggagtttctcctaccc

SEQ ID NO: 126168 - DNA, 38 bp, Artificial Sequence
  primer
gtaaaacgacggccagtgtgctgctctgcagatgtttc

SEQ ID NO: 126169 - DNA, 38 bp, Artificial Sequence
  primer
gtaaaacgacggccagtgcccagagagctactgacctc

SEQ ID NO: 126170 - DNA, 18 bp, Artificial Sequence
  primer
gaccctggctccctcctc

SEQ ID NO: 126171 - DNA, 21 bp, Artificial Sequence
  primer
gggaggtacacagagggtgag

SEQ ID NO: 126172 - DNA, 21 bp, Artificial Sequence
  primer
agaagagagtggctggtcctg

SEQ ID NO: 126173 - DNA, 21 bp, Artificial Sequence
  primer
ccaattcctgagatacagggc

SEQ ID NO: 126174 - DNA, 38 bp, Artificial Sequence
  primer
gtaaaacgacggccagtgaaggaggagatggtggtgac

SEQ ID NO: 126175 - DNA, 21 bp, Artificial Sequence
  primer
attcacctccgtggatgaaac

SEQ ID NO: 126176 - DNA, 36 bp, Artificial Sequence
  primer
gtaaaacgacggccagttgggaactgaaggacccac

SEQ ID NO: 126177 - DNA, 21 bp, Artificial Sequence
  primer
tttccttctggtcctttctcc

SEQ ID NO: 126178 - DNA, 21 bp, Artificial Sequence
  primer
ttcctagggacactttcctgg

SEQ ID NO: 126179 - DNA, 22 bp, Artificial Sequence
  primer
aaagaaagacaatttgggctcc

SEQ ID NO: 126180 - DNA, 38 bp, Artificial Sequence
  primer
gtaaaacgacggccagttaacctgctcacactgaaccc

SEQ ID NO: 126181 - DNA, 22 bp, Artificial Sequence
  primer
ttatgcatatgtgcaggacagg

SEQ ID NO: 126182 - DNA, 18 bp, Artificial Sequence
  primer
gggaaggctcgaggaaag

SEQ ID NO: 126183 - DNA, 38 bp, Artificial Sequence
  primer
gtaaaacgacggccagtccgggctatgttctggataag

SEQ ID NO: 126184 - DNA, 38 bp, Artificial Sequence
  primer
gtaaaacgacggccagtgtatggaggctaccggacaac

SEQ ID NO: 126185 - DNA, 22 bp, Artificial Sequence
  primer
gctggtttggaattaactctgg

SEQ ID NO: 126186 - DNA, 38 bp, Artificial Sequence
  primer
gtaaaacgacggccagtcgcaaccacaagagttaaagg

SEQ ID NO: 126187 - DNA, 21 bp, Artificial Sequence
  primer
aaggctgagctgagtttggtg

SEQ ID NO: 126188 - DNA, 38 bp, Artificial Sequence
  primer
gtaaaacgacggccagtaggccacaggatagtgaattg

SEQ ID NO: 126189 - DNA, 21 bp, Artificial Sequence
  primer
actttcctaaaggtcccagcc

SEQ ID NO: 126190 - DNA, 21 bp, Artificial Sequence
  primer
ggaggagcaaagggctctaag

SEQ ID NO: 126191 - DNA, 19 bp, Artificial Sequence
  primer
caggtgaatgccacacagg

SEQ ID NO: 126192 - DNA, 21 bp, Artificial Sequence
  primer
aataagtttcaggcccatccc

SEQ ID NO: 126193 - DNA, 38 bp, Artificial Sequence
  primer
gtaaaacgacggccagtatcattgatggcatccaaacc

SEQ ID NO: 126194 - DNA, 39 bp, Artificial Sequence
  primer
gtaaaacgacggccagtaaccagctagatgagcatgtcc

SEQ ID NO: 126195 - DNA, 21 bp, Artificial Sequence
  primer
tctgctctatgccttgctgtc

SEQ ID NO: 126196 - DNA, 21 bp, Artificial Sequence
  primer
aagagactgagcgagaccgac

SEQ ID NO: 126197 - DNA, 38 bp, Artificial Sequence
  primer
gtaaaacgacggccagtggtcaaggtaatcatcctggg

SEQ ID NO: 126198 - DNA, 22 bp, Artificial Sequence
  primer
cacatgcacacacacagagttg

SEQ ID NO: 126199 - DNA, 20 bp, Artificial Sequence
  primer
ccgagcaagaacagaaccac

SEQ ID NO: 126200 - DNA, 37 bp, Artificial Sequence
  primer
gtaaaacgacggccagtcagagactcggcccagagag

SEQ ID NO: 126201 - DNA, 21 bp, Artificial Sequence
  primer
accgtcggctttgtatcacac

SEQ ID NO: 126202 - DNA, 24 bp, Artificial Sequence
  primer
tgggtctggtcttacatagacaac

SEQ ID NO: 126203 - DNA, 43 bp, Artificial Sequence
  primer
gtaaaacgacggccagttgctaaagtcgctaaacaaacataag

SEQ ID NO: 126204 - DNA, 38 bp, Artificial Sequence
  primer
gtaaaacgacggccagtccttcagtctcacccttctcc

SEQ ID NO: 126205 - DNA, 38 bp, Artificial Sequence
  primer
gtaaaacgacggccagtgtaggtgaggaagcaagtggg

SEQ ID NO: 126206 - DNA, 38 bp, Artificial Sequence
  primer
gtaaaacgacggccagtcatgaagtcctgtcatccagc

SEQ ID NO: 126207 - DNA, 20 bp, Artificial Sequence
  primer
cttctcagcagcttgcatcc

SEQ ID NO: 126208 - DNA, 38 bp, Artificial Sequence
  primer
gtaaaacgacggccagttcagcacaatgtcacatctcg

SEQ ID NO: 126209 - DNA, 21 bp, Artificial Sequence
  primer
agcccagcttggagaggtaag

SEQ ID NO: 126210 - DNA, 38 bp, Artificial Sequence
  primer
gtaaaacgacggccagtcagaacacagtccacctgagc

SEQ ID NO: 126211 - DNA, 21 bp, Artificial Sequence
  primer
tagaatgtctccaggctgtcc

SEQ ID NO: 126212 - DNA, 21 bp, Artificial Sequence
  primer
aagggaggtcttccatgtctc

SEQ ID NO: 126213 - DNA, 21 bp, Artificial Sequence
  primer
ctagatgaatgaacgcatggc

SEQ ID NO: 126214 - DNA, 38 bp, Artificial Sequence
  primer
gtaaaacgacggccagtgtcaacacctcctccttcacc

SEQ ID NO: 126215 - DNA, 21 bp, Artificial Sequence
  primer
atcagcagaggtgcaaagtcc

SEQ ID NO: 126216 - DNA, 35 bp, Artificial Sequence
  primer
gtaaaacgacggccagtctcagccctcccttctcc

SEQ ID NO: 126217 - DNA, 21 bp, Artificial Sequence
  primer
ggcagcttgtgtctattggtg

SEQ ID NO: 126218 - DNA, 20 bp, Artificial Sequence
  primer
aactgcaatttccagggctc

SEQ ID NO: 126219 - DNA, 42 bp, Artificial Sequence
  primer
gtaaaacgacggccagttgccagtacatatgaagcatttagc

SEQ ID NO: 126220 - DNA, 21 bp, Artificial Sequence
  primer
gtggccaataattcaagggac

SEQ ID NO: 126221 - DNA, 38 bp, Artificial Sequence
  primer
gtaaaacgacggccagtagcaagggaacagtaaggctc

SEQ ID NO: 126222 - DNA, 38 bp, Artificial Sequence
  primer
gtaaaacgacggccagtgacataatggaagctggaccc

SEQ ID NO: 126223 - DNA, 21 bp, Artificial Sequence
  primer
ccacgagtcacttgatttccc

SEQ ID NO: 126224 - DNA, 38 bp, Artificial Sequence
  primer
gtaaaacgacggccagtgaggacaccgtacatgcaaac

SEQ ID NO: 126225 - DNA, 39 bp, Artificial Sequence
  primer
gtaaaacgacggccagtttaccctacccactaggccttt

SEQ ID NO: 126226 - DNA, 39 bp, Artificial Sequence
  primer
gtaaaacgacggccagtaaataacaccctctccacatcg

SEQ ID NO: 126227 - DNA, 38 bp, Artificial Sequence
  primer
gtaaaacgacggccagttagcacgagatcatgaggcac

SEQ ID NO: 126228 - DNA, 38 bp, Artificial Sequence
  primer
gtaaaacgacggccagttaataggaagtgtccgggtgc

SEQ ID NO: 126229 - DNA, 38 bp, Artificial Sequence
  primer
gtaaaacgacggccagtcttggtgaactgggctgagtc

SEQ ID NO: 126230 - DNA, 21 bp, Artificial Sequence
  primer
cacgtttgtggtgtccttgtc

SEQ ID NO: 126231 - DNA, 21 bp, Artificial Sequence
  primer
tgcagggtcacgtagttgaag

SEQ ID NO: 126232 - DNA, 38 bp, Artificial Sequence
  primer
gtaaaacgacggccagtagaacgagcatctgctatgcc

SEQ ID NO: 126233 - DNA, 21 bp, Artificial Sequence
  primer
agatgaagtgggcattagtgg

SEQ ID NO: 126234 - DNA, 21 bp, Artificial Sequence
  primer
atcagctttacagctttcggc

SEQ ID NO: 126235 - DNA, 38 bp, Artificial Sequence
  primer
gtaaaacgacggccagtatggattggtggaagaacctc

SEQ ID NO: 126236 - DNA, 21 bp, Artificial Sequence
  primer
agcattgtggacatcagcatc

SEQ ID NO: 126237 - DNA, 38 bp, Artificial Sequence
  primer
gtaaaacgacggccagtgaaaccttcacgagttctggg

SEQ ID NO: 126238 - DNA, 21 bp, Artificial Sequence
  primer
ccggcttcaactaggctaatg

SEQ ID NO: 126239 - DNA, 37 bp, Artificial Sequence
  primer
gtaaaacgacggccagtggatgggaggaagggtagtg

SEQ ID NO: 126240 - DNA, 21 bp, Artificial Sequence
  primer
aaatcatcaagcacgtatgcc

SEQ ID NO: 126241 - DNA, 21 bp, Artificial Sequence
  primer
aaacaggtctgtcaatgctgg

SEQ ID NO: 126242 - DNA, 21 bp, Artificial Sequence
  primer
gataataagctgctggcggtc

SEQ ID NO: 126243 - DNA, 40 bp, Artificial Sequence
  primer
gtaaaacgacggccagttgagtttgtttgatagctcgctc

SEQ ID NO: 126244 - DNA, 38 bp, Artificial Sequence
  primer
gtaaaacgacggccagttttgtgcaagtttgtggcatc

SEQ ID NO: 126245 - DNA, 39 bp, Artificial Sequence
  primer
gtaaaacgacggccagtccaattcgtgctttaacagtgc

SEQ ID NO: 126246 - DNA, 39 bp, Artificial Sequence
  primer
gtaaaacgacggccagtccagaatgaataagcctttggc

SEQ ID NO: 126247 - DNA, 21 bp, Artificial Sequence
  primer
tcaaagacatacacgggcttg

SEQ ID NO: 126248 - DNA, 21 bp, Artificial Sequence
  primer
gaaggtgaggcagtccatgtc

SEQ ID NO: 126249 - DNA, 38 bp, Artificial Sequence
  primer
gtaaaacgacggccagttctggcacagggtacttgttg

SEQ ID NO: 126250 - DNA, 38 bp, Artificial Sequence
  primer
gtaaaacgacggccagttagtggatcccttgggttctg

SEQ ID NO: 126251 - DNA, 21 bp, Artificial Sequence
  primer
gtacctctgtggccttcttgc

SEQ ID NO: 126252 - DNA, 47 bp, Artificial Sequence
  primer
gtaaaacgacggccagtgctgacttaagtatgctcattcaatagttt

SEQ ID NO: 126253 - DNA, 39 bp, Artificial Sequence
  primer
gtaaaacgacggccagttttcttgttgggaaatgatgaa

SEQ ID NO: 126254 - DNA, 22 bp, Artificial Sequence
  primer
tgacaattagccaatgtgggtt

SEQ ID NO: 126255 - DNA, 41 bp, Artificial Sequence
  primer
gtaaaacgacggccagtgaagaatcaaggtctgaaataccc

SEQ ID NO: 126256 - DNA, 44 bp, Artificial Sequence
  primer
gtaaaacgacggccagtaagcatggattaaatatggattaacaa

SEQ ID NO: 126257 - DNA, 40 bp, Artificial Sequence
  primer
gtaaaacgacggccagttcacacagaactttgatattcgg

SEQ ID NO: 126258 - DNA, 40 bp, Artificial Sequence
  primer
gtaaaacgacggccagtagaaatgttaggttcacactgcc

SEQ ID NO: 126259 - DNA, 38 bp, Artificial Sequence
  primer
gtaaaacgacggccagttgacctgaggtgactgacaag

SEQ ID NO: 126260 - DNA, 26 bp, Artificial Sequence
  primer
ttctgtcttccctatgtcaatgttac

SEQ ID NO: 126261 - DNA, 40 bp, Artificial Sequence
  primer
gtaaaacgacggccagtcaggcatttatcacaaaccattc

SEQ ID NO: 126262 - DNA, 39 bp, Artificial Sequence
  primer
gtaaaacgacggccagttcaaggaagtttcatgtttcaa

SEQ ID NO: 126263 - DNA, 27 bp, Artificial Sequence
  primer
agactttcacacatctatttcagtgag

SEQ ID NO: 126264 - DNA, 39 bp, Artificial Sequence
  primer
gtaaaacgacggccagtcctggtttgactatgattgctg

SEQ ID NO: 126265 - DNA, 22 bp, Artificial Sequence
  primer
tccttggagactttacgaggag

SEQ ID NO: 126266 - DNA, 25 bp, Artificial Sequence
  primer
caactagcagaggacactttcacac

SEQ ID NO: 126267 - DNA, 24 bp, Artificial Sequence
  primer
tttgtgttgatcctcaaatcattc

SEQ ID NO: 126268 - DNA, 20 bp, Artificial Sequence
  primer
ccctcctcaagcagacacac

SEQ ID NO: 126269 - DNA, 22 bp, Artificial Sequence
  primer
aagaaagcccttggtaggactg

SEQ ID NO: 126270 - DNA, 21 bp, Artificial Sequence
  primer
catggagcaaagcctggttag

SEQ ID NO: 126271 - DNA, 38 bp, Artificial Sequence
  primer
gtaaaacgacggccagtctgctggagagacttggcttc

SEQ ID NO: 126272 - DNA, 38 bp, Artificial Sequence
  primer
gtaaaacgacggccagttctccttgaactgctctgctc

SEQ ID NO: 126273 - DNA, 38 bp, Artificial Sequence
  primer
gtaaaacgacggccagtctattggcttagaagggagcg

SEQ ID NO: 126274 - DNA, 21 bp, Artificial Sequence
  primer
ctgggattacagacaccaacc

SEQ ID NO: 126275 - DNA, 37 bp, Artificial Sequence
  primer
gtaaaacgacggccagtaggcttgtgatcaatggcag

SEQ ID NO: 126276 - DNA, 21 bp, Artificial Sequence
  primer
tctctctttaccggttgagcc

SEQ ID NO: 126277 - DNA, 21 bp, Artificial Sequence
  primer
atgaagcttaaactccagggc

SEQ ID NO: 126278 - DNA, 21 bp, Artificial Sequence
  primer
ccaccaagatgcgtacatagg

SEQ ID NO: 126279 - DNA, 37 bp, Artificial Sequence
  primer
gtaaaacgacggccagtcttcagggcatcttgctttg

SEQ ID NO: 126280 - DNA, 25 bp, Artificial Sequence
  primer
ttcccactaagtatcctctcctctc

SEQ ID NO: 126281 - DNA, 21 bp, Artificial Sequence
  primer
atttcacaattacccatgccc

SEQ ID NO: 126282 - DNA, 21 bp, Artificial Sequence
  primer
gagcctgctcaggtagctttc

SEQ ID NO: 126283 - DNA, 21 bp, Artificial Sequence
  primer
aagcaggaattcactccaagg

SEQ ID NO: 126284 - DNA, 21 bp, Artificial Sequence
  primer
ctctcctctggaaggaaagca

SEQ ID NO: 126285 - DNA, 40 bp, Artificial Sequence
  primer
gtaaaacgacggccagtttccaggagcaatttatcctctc

SEQ ID NO: 126286 - DNA, 38 bp, Artificial Sequence
  primer
gtaaaacgacggccagtccaaacctactgtgaggtggc

SEQ ID NO: 126287 - DNA, 43 bp, Artificial Sequence
  primer
gtaaaacgacggccagttgtctaccataagcatagaagttggg

SEQ ID NO: 126288 - DNA, 21 bp, Artificial Sequence
  primer
attgtgagttgggttgccttc

SEQ ID NO: 126289 - DNA, 21 bp, Artificial Sequence
  primer
gaacagtgccagagggaagac

SEQ ID NO: 126290 - DNA, 21 bp, Artificial Sequence
  primer
cctgggtctccaataccactg

SEQ ID NO: 126291 - DNA, 38 bp, Artificial Sequence
  primer
gtaaaacgacggccagtgtggtgattcaggcactcctc

SEQ ID NO: 126292 - DNA, 38 bp, Artificial Sequence
  primer
gtaaaacgacggccagtcctattcttggtgccatttcg

SEQ ID NO: 126293 - DNA, 21 bp, Artificial Sequence
  primer
ttgatcccaatcacccttacc

SEQ ID NO: 126294 - DNA, 20 bp, Artificial Sequence
  primer
gatggtaaggagggctgtgg

SEQ ID NO: 126295 - DNA, 42 bp, Artificial Sequence
  primer
gtaaaacgacggccagtcaaatttcaatggacttagttctgc

SEQ ID NO: 126296 - DNA, 21 bp, Artificial Sequence
  primer
aggagaggttaaagcccaagc

SEQ ID NO: 126297 - DNA, 38 bp, Artificial Sequence
  primer
gtaaaacgacggccagtggactcctgccatagaccaac

SEQ ID NO: 126298 - DNA, 22 bp, Artificial Sequence
  primer
tggctagttagctgggactttg

SEQ ID NO: 126299 - DNA, 38 bp, Artificial Sequence
  primer
gtaaaacgacggccagttggagttggcagtgctgtatc

SEQ ID NO: 126300 - DNA, 20 bp, Artificial Sequence
  primer
ggtgatagggccagactcag

SEQ ID NO: 126301 - DNA, 22 bp, Artificial Sequence
  primer
gcattcactcgaaacacagaag

SEQ ID NO: 126302 - DNA, 20 bp, Artificial Sequence
  primer
gccagagaagtttgggtgtg

SEQ ID NO: 126303 - DNA, 39 bp, Artificial Sequence
  primer
gtaaaacgacggccagtcatggatatgtcaatgcctcac

SEQ ID NO: 126304 - DNA, 23 bp, Artificial Sequence
  primer
tgttgcttcaacaagccttctac

SEQ ID NO: 126305 - DNA, 23 bp, Artificial Sequence
  primer
gacaagctgaatataaggcaggg

SEQ ID NO: 126306 - DNA, 20 bp, Artificial Sequence
  primer
agagcgagactccgtctcaa

SEQ ID NO: 126307 - DNA, 39 bp, Artificial Sequence
  primer
gtaaaacgacggccagttcctcaataaatggattggctg

SEQ ID NO: 126308 - DNA, 18 bp, Artificial Sequence
  primer
gtgggcgcctgtagttcc

SEQ ID NO: 126309 - DNA, 38 bp, Artificial Sequence
  primer
gtaaaacgacggccagtctctccgggaagacagaggtt

SEQ ID NO: 126310 - DNA, 22 bp, Artificial Sequence
  primer
cctacctagaccctggttgtcc

SEQ ID NO: 126311 - DNA, 38 bp, Artificial Sequence
  primer
gtaaaacgacggccagtagacgcccagaaagaaagaac

SEQ ID NO: 126312 - DNA, 38 bp, Artificial Sequence
  primer
gtaaaacgacggccagtaccctgcaagctatcagaacc

SEQ ID NO: 126313 - DNA, 21 bp, Artificial Sequence
  primer
tgcgattgaaatccatacctg

SEQ ID NO: 126314 - DNA, 22 bp, Artificial Sequence
  primer
tctgacgtggctgttgttagtg

SEQ ID NO: 126315 - DNA, 21 bp, Artificial Sequence
  primer
tgttctgagtcatggccaatc

SEQ ID NO: 126316 - DNA, 21 bp, Artificial Sequence
  primer
atctgcaagaagcacagttgg

SEQ ID NO: 126317 - DNA, 22 bp, Artificial Sequence
  primer
aaccaagaatcctatcttgggc

SEQ ID NO: 126318 - DNA, 21 bp, Artificial Sequence
  primer
gagcagctccagcattctatg

SEQ ID NO: 126319 - DNA, 22 bp, Artificial Sequence
  primer
tcacacaagcactgggtgtatc

SEQ ID NO: 126320 - DNA, 20 bp, Artificial Sequence
  primer
acatgctcacagcatctccc

SEQ ID NO: 126321 - DNA, 37 bp, Artificial Sequence
  primer
gtaaaacgacggccagtcattaagccaatgggaaggg

SEQ ID NO: 126322 - DNA, 38 bp, Artificial Sequence
  primer
gtaaaacgacggccagtggtcattcttctgcacagtgg

SEQ ID NO: 126323 - DNA, 38 bp, Artificial Sequence
  primer
gtaaaacgacggccagtacatggcgtaacctgctactg

SEQ ID NO: 126324 - DNA, 20 bp, Artificial Sequence
  primer
ttctcgtaagcaaacgtggg

SEQ ID NO: 126325 - DNA, 37 bp, Artificial Sequence
  primer
gtaaaacgacggccagtccctttagcctcacccagtg

SEQ ID NO: 126326 - DNA, 19 bp, Artificial Sequence
  primer
ctgccagatctccagccac

SEQ ID NO: 126327 - DNA, 38 bp, Artificial Sequence
  primer
gtaaaacgacggccagtgcggtcagggacttacacttc

SEQ ID NO: 126328 - DNA, 21 bp, Artificial Sequence
  primer
gtccttagccttgtcacggtc

SEQ ID NO: 126329 - DNA, 38 bp, Artificial Sequence
  primer
gtaaaacgacggccagtgttgcctgtttccaatccttg

SEQ ID NO: 126330 - DNA, 21 bp, Artificial Sequence
  primer
actcatcgaacgtgacacagg

SEQ ID NO: 126331 - DNA, 21 bp, Artificial Sequence
  primer
gacagtctccacgacctagcc

SEQ ID NO: 126332 - DNA, 21 bp, Artificial Sequence
  primer
gtggatgagaataagggctcg

SEQ ID NO: 126333 - DNA, 21 bp, Artificial Sequence
  primer
tggctcttaaggatctccagc

SEQ ID NO: 126334 - DNA, 21 bp, Artificial Sequence
  primer
gcctcctctctaggacatccc

SEQ ID NO: 126335 - DNA, 37 bp, Artificial Sequence
  primer
gtaaaacgacggccagtctgaaaggccatttcccttg

SEQ ID NO: 126336 - DNA, 21 bp, Artificial Sequence
  primer
tgtatgtagacggagggcctg

SEQ ID NO: 126337 - DNA, 21 bp, Artificial Sequence
  primer
gtactgtcccgtttcctggag

SEQ ID NO: 126338 - DNA, 21 bp, Artificial Sequence
  primer
gcctcgaggactaaacaccac

SEQ ID NO: 126339 - DNA, 20 bp, Artificial Sequence
  primer
ctgcagcagagtcttcaccc

SEQ ID NO: 126340 - DNA, 21 bp, Artificial Sequence
  primer
tctaccacagaggccaactcc

SEQ ID NO: 126341 - DNA, 21 bp, Artificial Sequence
  primer
aaggtctcccagagcaagatg

SEQ ID NO: 126342 - DNA, 21 bp, Artificial Sequence
  primer
ggaaggttggcattaagggag

SEQ ID NO: 126343 - DNA, 21 bp, Artificial Sequence
  primer
ccaggactgtgaagagctgtc

SEQ ID NO: 126344 - DNA, 21 bp, Artificial Sequence
  primer
ataagtgcgttgttgctgacc

SEQ ID NO: 126345 - DNA, 39 bp, Artificial Sequence
  primer
gtaaaacgacggccagtgccaggagattataaagtgggc

SEQ ID NO: 126346 - DNA, 22 bp, Artificial Sequence
  primer
tcttggcaaagacctggttaag

SEQ ID NO: 126347 - DNA, 38 bp, Artificial Sequence
  primer
gtaaaacgacggccagttttcctcccagcttaggaacc

SEQ ID NO: 126348 - DNA, 21 bp, Artificial Sequence
  primer
tagtcagatgctccttgaggg

SEQ ID NO: 126349 - DNA, 37 bp, Artificial Sequence
  primer
gtaaaacgacggccagtagtggtgagcaaggtggttg

SEQ ID NO: 126350 - DNA, 20 bp, Artificial Sequence
  primer
gtgtgcacgctctgtctctg

SEQ ID NO: 126351 - DNA, 38 bp, Artificial Sequence
  primer
gtaaaacgacggccagtctacattacaatcggccctcc

SEQ ID NO: 126352 - DNA, 38 bp, Artificial Sequence
  primer
gtaaaacgacggccagtgtccacactgctcccacctac

SEQ ID NO: 126353 - DNA, 21 bp, Artificial Sequence
  primer
ttgctcatgatgttcttgtcg

SEQ ID NO: 126354 - DNA, 19 bp, Artificial Sequence
  primer
ggccatgaggttgagtttg

SEQ ID NO: 126355 - DNA, 38 bp, Artificial Sequence
  primer
gtaaaacgacggccagtattagaggacggttgacggag

SEQ ID NO: 126356 - DNA, 23 bp, Artificial Sequence
  primer
cagaaaccagcactatgtcaagg

SEQ ID NO: 126357 - DNA, 39 bp, Artificial Sequence
  primer
gtaaaacgacggccagtgcccaggctggtcttaaattac

SEQ ID NO: 126358 - DNA, 21 bp, Artificial Sequence
  primer
atggatgtggcaagtgtgttc

SEQ ID NO: 126359 - DNA, 38 bp, Artificial Sequence
  primer
gtaaaacgacggccagtcatgtacaaagcacacagccc

SEQ ID NO: 126360 - DNA, 20 bp, Artificial Sequence
  primer
gttggtagggcactgaaacg

SEQ ID NO: 126361 - DNA, 38 bp, Artificial Sequence
  primer
gtaaaacgacggccagttgctgggataattctggtgag

SEQ ID NO: 126362 - DNA, 38 bp, Artificial Sequence
  primer
gtaaaacgacggccagtaacctgctttgaggagtctcg

SEQ ID NO: 126363 - DNA, 38 bp, Artificial Sequence
  primer
gtaaaacgacggccagtctgggaaggttccctaactgg

SEQ ID NO: 126364 - DNA, 20 bp, Artificial Sequence
  primer
ctctcctgacaccagcaagg

SEQ ID NO: 126365 - DNA, 23 bp, Artificial Sequence
  primer
cagaaaccagcactatgtcaagg

SEQ ID NO: 126366 - DNA, 18 bp, Artificial Sequence
  primer
aggaaggaggcgagaggg

SEQ ID NO: 126367 - DNA, 21 bp, Artificial Sequence
  primer
tgagaggcaggtcagtgaatc

SEQ ID NO: 126368 - DNA, 39 bp, Artificial Sequence
  primer
gtaaaacgacggccagtccaacagccatcatttactgtc

SEQ ID NO: 126369 - DNA, 39 bp, Artificial Sequence
  primer
gtaaaacgacggccagtggatgaaatcaaagctttctgg

SEQ ID NO: 126370 - DNA, 21 bp, Artificial Sequence
  primer
acactcctgcccatgtacaac

SEQ ID NO: 126371 - DNA, 44 bp, Artificial Sequence
  primer
gtaaaacgacggccagtgttactgttgtatttaatgtcacagcc

SEQ ID NO: 126372 - DNA, 39 bp, Artificial Sequence
  primer
gtaaaacgacggccagtttaatgaaagttgtgcattggg

SEQ ID NO: 126373 - DNA, 38 bp, Artificial Sequence
  primer
gtaaaacgacggccagtgggtaatggtagccagctctc

SEQ ID NO: 126374 - DNA, 21 bp, Artificial Sequence
  primer
ggtagactctgacctccaggc

SEQ ID NO: 126375 - DNA, 37 bp, Artificial Sequence
  primer
gtaaaacgacggccagttctgggaccaatcaggtcag

SEQ ID NO: 126376 - DNA, 44 bp, Artificial Sequence
  primer
gtaaaacgacggccagtgggatgaaattgtcatagatataagcg

SEQ ID NO: 126377 - DNA, 39 bp, Artificial Sequence
  primer
gtaaaacgacggccagtcagtgcataactatcgccttcc

SEQ ID NO: 126378 - DNA, 21 bp, Artificial Sequence
  primer
gttaatgccttccactctggg

SEQ ID NO: 126379 - DNA, 38 bp, Artificial Sequence
  primer
gtaaaacgacggccagtacttccagttccagagctccc

SEQ ID NO: 126380 - DNA, 21 bp, Artificial Sequence
  primer
gacacctcttcaaatgtgccc

SEQ ID NO: 126381 - DNA, 21 bp, Artificial Sequence
  primer
gaagaaggcagcttcatcagg

SEQ ID NO: 126382 - DNA, 21 bp, Artificial Sequence
  primer
gaattcagctatcccagggtg

SEQ ID NO: 126383 - DNA, 21 bp, Artificial Sequence
  primer
agatgagacagacaaaggccc

SEQ ID NO: 126384 - DNA, 21 bp, Artificial Sequence
  primer
tgcatgttgttgtgagaggtg

SEQ ID NO: 126385 - DNA, 21 bp, Artificial Sequence
  primer
aagacagagtgctcccattcc

SEQ ID NO: 126386 - DNA, 38 bp, Artificial Sequence
  primer
gtaaaacgacggccagtgatgtactgaatggcccttgg

SEQ ID NO: 126387 - DNA, 43 bp, Artificial Sequence
  primer
gtaaaacgacggccagttcacagtactcagaatagcaagtgag

SEQ ID NO: 126388 - DNA, 22 bp, Artificial Sequence
  primer
tgtgggtcagtgaaacattagc

SEQ ID NO: 126389 - DNA, 21 bp, Artificial Sequence
  primer
cttatctggcaagttgcaggg

SEQ ID NO: 126390 - DNA, 23 bp, Artificial Sequence
  primer
tgtcattatgatctgttgggaaa

SEQ ID NO: 126391 - DNA, 37 bp, Artificial Sequence
  primer
gtaaaacgacggccagtaccacacctggccttgtttc

SEQ ID NO: 126392 - DNA, 22 bp, Artificial Sequence
  primer
caggaaactcctcttaactgcc

SEQ ID NO: 126393 - DNA, 20 bp, Artificial Sequence
  primer
agtgcccaggaagtggtagc

SEQ ID NO: 126394 - DNA, 21 bp, Artificial Sequence
  primer
cacactcacgtctgcttgaga

SEQ ID NO: 126395 - DNA, 38 bp, Artificial Sequence
  primer
gtaaaacgacggccagtagagggctcgagaacaagaac

SEQ ID NO: 126396 - DNA, 21 bp, Artificial Sequence
  primer
aaaccctcttctctgccactg

SEQ ID NO: 126397 - DNA, 38 bp, Artificial Sequence
  primer
gtaaaacgacggccagtaggcctctcctgactatccct

SEQ ID NO: 126398 - DNA, 38 bp, Artificial Sequence
  primer
gtaaaacgacggccagtctctcggtgaacacaggtcag

SEQ ID NO: 126399 - DNA, 38 bp, Artificial Sequence
  primer
gtaaaacgacggccagttcacagagcttggaaacaagg

SEQ ID NO: 126400 - DNA, 21 bp, Artificial Sequence
  primer
tgaactcaggccctatcactg

SEQ ID NO: 126401 - DNA, 21 bp, Artificial Sequence
  primer
tgtgtacacctctgggtctgg

SEQ ID NO: 126402 - DNA, 21 bp, Artificial Sequence
  primer
cttcctccttctgtgacaggc

SEQ ID NO: 126403 - DNA, 21 bp, Artificial Sequence
  primer
atttcaatcatgtggcaatgg

SEQ ID NO: 126404 - DNA, 38 bp, Artificial Sequence
  primer
gtaaaacgacggccagtccttcagcagcttatgcattc

SEQ ID NO: 126405 - DNA, 21 bp, Artificial Sequence
  primer
caagtcacttctctgcaaggc

SEQ ID NO: 126406 - DNA, 21 bp, Artificial Sequence
  primer
tcaaagccagcatctttgttc

SEQ ID NO: 126407 - DNA, 37 bp, Artificial Sequence
  primer
gtaaaacgacggccagtgcccatcctttctctggaac

SEQ ID NO: 126408 - DNA, 38 bp, Artificial Sequence
  primer
gtaaaacgacggccagtcaacctctgcacctcagtttg

SEQ ID NO: 126409 - DNA, 21 bp, Artificial Sequence
  primer
aagtcatgcattgcctctctg

SEQ ID NO: 126410 - DNA, 21 bp, Artificial Sequence
  primer
tcagcataccaactcccacag

SEQ ID NO: 126411 - DNA, 38 bp, Artificial Sequence
  primer
gtaaaacgacggccagtaatactcgggcctcctcagtc

SEQ ID NO: 126412 - DNA, 21 bp, Artificial Sequence
  primer
gctcaccttatcttccaaggc

SEQ ID NO: 126413 - DNA, 21 bp, Artificial Sequence
  primer
gtattgactgagctgggaggg

SEQ ID NO: 126414 - DNA, 38 bp, Artificial Sequence
  primer
gtaaaacgacggccagtgacactctcccatgctccaag

SEQ ID NO: 126415 - DNA, 21 bp, Artificial Sequence
  primer
ctagctcccagctgacctctg

SEQ ID NO: 126416 - DNA, 21 bp, Artificial Sequence
  primer
caaggcttcctggagtcaaag

SEQ ID NO: 126417 - DNA, 21 bp, Artificial Sequence
  primer
cccttcactgtgcagacagac

SEQ ID NO: 126418 - DNA, 21 bp, Artificial Sequence
  primer
ggaatcactcaaggcaacctg

SEQ ID NO: 126419 - DNA, 38 bp, Artificial Sequence
  primer
gtaaaacgacggccagtaagtgccagtggttgatgttg

SEQ ID NO: 126420 - DNA, 38 bp, Artificial Sequence
  primer
gtaaaacgacggccagtgataggtgtcatgggtgggac

SEQ ID NO: 126421 - DNA, 21 bp, Artificial Sequence
  primer
acctgtccaaagtcatctggg

SEQ ID NO: 126422 - DNA, 38 bp, Artificial Sequence
  primer
gtaaaacgacggccagttgtgattgagaacctggttgg

SEQ ID NO: 126423 - DNA, 38 bp, Artificial Sequence
  primer
gtaaaacgacggccagtctgctcggaaagtgaacacag

SEQ ID NO: 126424 - DNA, 20 bp, Artificial Sequence
  primer
aggctagggagaatcccagg

SEQ ID NO: 126425 - DNA, 38 bp, Artificial Sequence
  primer
gtaaaacgacggccagttccctctgagctggtataggc

SEQ ID NO: 126426 - DNA, 21 bp, Artificial Sequence
  primer
aggcctaggtaggaaaggtgg

SEQ ID NO: 126427 - DNA, 38 bp, Artificial Sequence
  primer
gtaaaacgacggccagtgcttgttcctcagcactggac

SEQ ID NO: 126428 - DNA, 21 bp, Artificial Sequence
  primer
tggagctagcaatactcaccc

SEQ ID NO: 126429 - DNA, 37 bp, Artificial Sequence
  primer
gtaaaacgacggccagtacagggtcagtctgtggcag

SEQ ID NO: 126430 - DNA, 20 bp, Artificial Sequence
  primer
atccttgtcagccttctggg

SEQ ID NO: 126431 - DNA, 38 bp, Artificial Sequence
  primer
gtaaaacgacggccagtattcctggaaacaaggtgtgg

SEQ ID NO: 126432 - DNA, 20 bp, Artificial Sequence
  primer
gtggcatgtgcctgtagtcc

SEQ ID NO: 126433 - DNA, 21 bp, Artificial Sequence
  primer
taagtggctggtcaaggtcac

SEQ ID NO: 126434 - DNA, 21 bp, Artificial Sequence
  primer
agcatcaacagaacatctggg

SEQ ID NO: 126435 - DNA, 23 bp, Artificial Sequence
  primer
tttccctctggtctctctgtttc

SEQ ID NO: 126436 - DNA, 38 bp, Artificial Sequence
  primer
gtaaaacgacggccagtaaagagtcacttgtggagccc

SEQ ID NO: 126437 - DNA, 20 bp, Artificial Sequence
  primer
agaagagccatgtccttggg

SEQ ID NO: 126438 - DNA, 39 bp, Artificial Sequence
  primer
gtaaaacgacggccagtacagatagggtctatggcttgg

SEQ ID NO: 126439 - DNA, 18 bp, Artificial Sequence
  primer
acggaaccctggtgcttc

SEQ ID NO: 126440 - DNA, 38 bp, Artificial Sequence
  primer
gtaaaacgacggccagtaagctgcttatgaaggcacag

SEQ ID NO: 126441 - DNA, 21 bp, Artificial Sequence
  primer
cctggtgtagcaggaggaaag

SEQ ID NO: 126442 - DNA, 38 bp, Artificial Sequence
  primer
gtaaaacgacggccagtaccacctccaaccaggtaatg

SEQ ID NO: 126443 - DNA, 38 bp, Artificial Sequence
  primer
gtaaaacgacggccagtggtgaggactcagctgctctg

SEQ ID NO: 126444 - DNA, 21 bp, Artificial Sequence
  primer
actcctggatgcaaatggttc

SEQ ID NO: 126445 - DNA, 21 bp, Artificial Sequence
  primer
tttctgaaggcctaccaaacc

SEQ ID NO: 126446 - DNA, 21 bp, Artificial Sequence
  primer
tatgtgcgtatcaagcaaggg

SEQ ID NO: 126447 - DNA, 38 bp, Artificial Sequence
  primer
gtaaaacgacggccagtccagtgtgggtgatctgattc

SEQ ID NO: 126448 - DNA, 38 bp, Artificial Sequence
  primer
gtaaaacgacggccagtgtgctggagatttccttgagc

SEQ ID NO: 126449 - DNA, 23 bp, Artificial Sequence
  primer
gttacagttgtgtgtggcatttc

SEQ ID NO: 126450 - DNA, 38 bp, Artificial Sequence
  primer
gtaaaacgacggccagtatgcagcatgtgactgatacg

SEQ ID NO: 126451 - DNA, 24 bp, Artificial Sequence
  primer
tttctctttgaaaccataaggctg

SEQ ID NO: 126452 - DNA, 42 bp, Artificial Sequence
  primer
gtaaaacgacggccagtcatctatttcaattcactttggtcc

SEQ ID NO: 126453 - DNA, 18 bp, Artificial Sequence
  primer
gagatccactcgcctcgg

SEQ ID NO: 126454 - DNA, 40 bp, Artificial Sequence
  primer
gtaaaacgacggccagtcaaccagagttccagagatatgc

SEQ ID NO: 126455 - DNA, 22 bp, Artificial Sequence
  primer
gctactcaagaggctgagatgc

SEQ ID NO: 126456 - DNA, 38 bp, Artificial Sequence
  primer
gtaaaacgacggccagtaaccagccagttctgacattg

SEQ ID NO: 126457 - DNA, 21 bp, Artificial Sequence
  primer
cagtcctctgcacgtaattgg

SEQ ID NO: 126458 - DNA, 18 bp, Artificial Sequence
  primer
gtgccactgcacctcagc

SEQ ID NO: 126459 - DNA, 37 bp, Artificial Sequence
  primer
gtaaaacgacggccagttttgagtccgctgtccactc

SEQ ID NO: 126460 - DNA, 39 bp, Artificial Sequence
  primer
gtaaaacgacggccagttgtgtaagaagagctgggaatg

SEQ ID NO: 126461 - DNA, 38 bp, Artificial Sequence
  primer
gtaaaacgacggccagtaaagaggtgctctcagttggg

SEQ ID NO: 126462 - DNA, 20 bp, Artificial Sequence
  primer
caccctctgcctcacagttc

SEQ ID NO: 126463 - DNA, 37 bp, Artificial Sequence
  primer
gtaaaacgacggccagtgtctttcccacctcctctgc

SEQ ID NO: 126464 - DNA, 21 bp, Artificial Sequence
  primer
agggagagctctttgtgatgg

SEQ ID NO: 126465 - DNA, 39 bp, Artificial Sequence
  primer
gtaaaacgacggccagttcttcaaaggactccactctgg

SEQ ID NO: 126466 - DNA, 21 bp, Artificial Sequence
  primer
gtacctttctgcgtcctggtc

SEQ ID NO: 126467 - DNA, 21 bp, Artificial Sequence
  primer
gaaagcaagtccatctgtccc

SEQ ID NO: 126468 - DNA, 21 bp, Artificial Sequence
  primer
ctatctgcaaacagctccgtc

SEQ ID NO: 126469 - DNA, 38 bp, Artificial Sequence
  primer
gtaaaacgacggccagttggagcatctccacgtatctg

SEQ ID NO: 126470 - DNA, 21 bp, Artificial Sequence
  primer
gtctccacattgctttcctgc

SEQ ID NO: 126471 - DNA, 21 bp, Artificial Sequence
  primer
ggctttcccatcaatcaaatg

SEQ ID NO: 126472 - DNA, 21 bp, Artificial Sequence
  primer
caagatgtcccactgatttgc

SEQ ID NO: 126473 - DNA, 21 bp, Artificial Sequence
  primer
aaagctcaactggagggaaag

SEQ ID NO: 126474 - DNA, 38 bp, Artificial Sequence
  primer
gtaaaacgacggccagtgggactatatcctgggccttg

SEQ ID NO: 126475 - DNA, 21 bp, Artificial Sequence
  primer
tttgaacagtgaactggaggc

SEQ ID NO: 126476 - DNA, 38 bp, Artificial Sequence
  primer
gtaaaacgacggccagttaactgctctgcaggcaacac

SEQ ID NO: 126477 - DNA, 39 bp, Artificial Sequence
  primer
gtaaaacgacggccagtccacttgtccttgaataatggc

SEQ ID NO: 126478 - DNA, 38 bp, Artificial Sequence
  primer
gtaaaacgacggccagtcagcacaaacttgctgtagcc

SEQ ID NO: 126479 - DNA, 21 bp, Artificial Sequence
  primer
cccagaaggatactttgaccc

SEQ ID NO: 126480 - DNA, 38 bp, Artificial Sequence
  primer
gtaaaacgacggccagtcaggagctacacgtccatctg

SEQ ID NO: 126481 - DNA, 38 bp, Artificial Sequence
  primer
gtaaaacgacggccagtagtagctgctggacatccctg

SEQ ID NO: 126482 - DNA, 21 bp, Artificial Sequence
  primer
ataactccctccagggaaagc

SEQ ID NO: 126483 - DNA, 21 bp, Artificial Sequence
  primer
ggtctgactccgtctacccag

SEQ ID NO: 126484 - DNA, 21 bp, Artificial Sequence
  primer
ttgcaagtgacaggatgtgtg

SEQ ID NO: 126485 - DNA, 21 bp, Artificial Sequence
  primer
gggataggatgaatggagcag

SEQ ID NO: 126486 - DNA, 21 bp, Artificial Sequence
  primer
tgtgtgtccggatgagttgag

SEQ ID NO: 126487 - DNA, 21 bp, Artificial Sequence
  primer
cttcacacatcgcatttcacc

SEQ ID NO: 126488 - DNA, 38 bp, Artificial Sequence
  primer
gtaaaacgacggccagtaactgcaggaacacattggtg

SEQ ID NO: 126489 - DNA, 21 bp, Artificial Sequence
  primer
ggcatctttgagctcctcttc

SEQ ID NO: 126490 - DNA, 21 bp, Artificial Sequence
  primer
gtggcaactgtgatgatcagg

SEQ ID NO: 126491 - DNA, 24 bp, Artificial Sequence
  primer
aaatgaatttctaagggaccaagg

SEQ ID NO: 126492 - DNA, 21 bp, Artificial Sequence
  primer
agtcctgtgcatcactgttgg

SEQ ID NO: 126493 - DNA, 41 bp, Artificial Sequence
  primer
gtaaaacgacggccagtgcaagttaatttgagctgcttagg

SEQ ID NO: 126494 - DNA, 21 bp, Artificial Sequence
  primer
gcccgtttaggcatatcaaag

SEQ ID NO: 126495 - DNA, 39 bp, Artificial Sequence
  primer
gtaaaacgacggccagtgagtctttgcaaggcttagtgc

SEQ ID NO: 126496 - DNA, 38 bp, Artificial Sequence
  primer
gtaaaacgacggccagtttggtcatccaaagactcagc

SEQ ID NO: 126497 - DNA, 22 bp, Artificial Sequence
  primer
caggctgttgaaggttaattgc

SEQ ID NO: 126498 - DNA, 38 bp, Artificial Sequence
  primer
gtaaaacgacggccagtactcacaagggtttctgtgcc

SEQ ID NO: 126499 - DNA, 28 bp, Artificial Sequence
  primer
gctactaagactctttcagaaatcatgt

SEQ ID NO: 126500 - DNA, 42 bp, Artificial Sequence
  primer
gtaaaacgacggccagtgctcttcatgtattgctaatgcaaa

SEQ ID NO: 126501 - DNA, 43 bp, Artificial Sequence
  primer
gtaaaacgacggccagtcaatctatggataactgcaaagacaa

SEQ ID NO: 126502 - DNA, 43 bp, Artificial Sequence
  primer
gtaaaacgacggccagtcaatgactgcaacttgttattaaagc

SEQ ID NO: 126503 - DNA, 38 bp, Artificial Sequence
  primer
gtaaaacgacggccagtaggcacccgagtttcataaag

SEQ ID NO: 126504 - DNA, 38 bp, Artificial Sequence
  primer
gtaaaacgacggccagtacctgcccttcaagtcgtatg

SEQ ID NO: 126505 - DNA, 21 bp, Artificial Sequence
  primer
ctgcacaatttcatggtgtcc

SEQ ID NO: 126506 - DNA, 20 bp, Artificial Sequence
  primer
aaactgtgtgaggtcgctgg

SEQ ID NO: 126507 - DNA, 38 bp, Artificial Sequence
  primer
gtaaaacgacggccagtcagttcaagaagctggtgagg

SEQ ID NO: 126508 - DNA, 38 bp, Artificial Sequence
  primer
gtaaaacgacggccagtcagccaagattgtaccactgc

SEQ ID NO: 126509 - DNA, 20 bp, Artificial Sequence
  primer
tgaggtgggagaactgcttg

SEQ ID NO: 126510 - DNA, 24 bp, Artificial Sequence
  primer
aacacatgttgctttcttaaaccc

SEQ ID NO: 126511 - DNA, 39 bp, Artificial Sequence
  primer
gtaaaacgacggccagtctctgaagtaggagggtggaag

SEQ ID NO: 126512 - DNA, 23 bp, Artificial Sequence
  primer
tgtaccgaaggtgtttctctcag

SEQ ID NO: 126513 - DNA, 21 bp, Artificial Sequence
  primer
atcagccacatccatcatcag

SEQ ID NO: 126514 - DNA, 22 bp, Artificial Sequence
  primer
aataacagcaacaacacctccc

SEQ ID NO: 126515 - DNA, 21 bp, Artificial Sequence
  primer
cccatgccttaaagtaggtca

SEQ ID NO: 126516 - DNA, 38 bp, Artificial Sequence
  primer
gtaaaacgacggccagttggttggctttatcttggcag

SEQ ID NO: 126517 - DNA, 21 bp, Artificial Sequence
  primer
ttaaatgtgcaccttcctccc

SEQ ID NO: 126518 - DNA, 21 bp, Artificial Sequence
  primer
ataaagcagagtgagggtggg

SEQ ID NO: 126519 - DNA, 38 bp, Artificial Sequence
  primer
gtaaaacgacggccagttacaaattcaggctctgtggg

SEQ ID NO: 126520 - DNA, 21 bp, Artificial Sequence
  primer
aggccaacaaaccaattcttc

SEQ ID NO: 126521 - DNA, 18 bp, Artificial Sequence
  primer
tggccacatctggaacag

SEQ ID NO: 126522 - DNA, 39 bp, Artificial Sequence
  primer
gtaaaacgacggccagtcaaagctattcggtgtctggag

SEQ ID NO: 126523 - DNA, 20 bp, Artificial Sequence
  primer
gcaacgtgtctttgcctttc

SEQ ID NO: 126524 - DNA, 39 bp, Artificial Sequence
  primer
gtaaaacgacggccagtccctattcttcagagtccctgg

SEQ ID NO: 126525 - DNA, 38 bp, Artificial Sequence
  primer
gtaaaacgacggccagtccttagaggtcaggaagacgg

SEQ ID NO: 126526 - DNA, 38 bp, Artificial Sequence
  primer
gtaaaacgacggccagtttgaggaaggttgtcattccc

SEQ ID NO: 126527 - DNA, 38 bp, Artificial Sequence
  primer
gtaaaacgacggccagtcttgtagcctgagctgtctgc

SEQ ID NO: 126528 - DNA, 38 bp, Artificial Sequence
  primer
gtaaaacgacggccagtgtgagagcaggactgggagac

SEQ ID NO: 126529 - DNA, 20 bp, Artificial Sequence
  primer
gaatcctggttcccttccac

SEQ ID NO: 126530 - DNA, 21 bp, Artificial Sequence
  primer
tggtaaggcagcttagcaatg

SEQ ID NO: 126531 - DNA, 40 bp, Artificial Sequence
  primer
gtaaaacgacggccagtttgcctaacatgatggttactcc

SEQ ID NO: 126532 - DNA, 38 bp, Artificial Sequence
  primer
gtaaaacgacggccagtttccaggcaaactctctggac

SEQ ID NO: 126533 - DNA, 21 bp, Artificial Sequence
  primer
tggaaggaaatgggtaaatgg

SEQ ID NO: 126534 - DNA, 39 bp, Artificial Sequence
  primer
gtaaaacgacggccagtcctatgctacatacctgctccc

SEQ ID NO: 126535 - DNA, 38 bp, Artificial Sequence
  primer
gtaaaacgacggccagtcatcccggagtaaagggaatc

SEQ ID NO: 126536 - DNA, 24 bp, Artificial Sequence
  primer
tttaattcaggatttaggaaagcg

SEQ ID NO: 126537 - DNA, 23 bp, Artificial Sequence
  primer
tttccatcaacattcttctcctc

SEQ ID NO: 126538 - DNA, 23 bp, Artificial Sequence
  primer
gggtacagtgtatactgcttggg

SEQ ID NO: 126539 - DNA, 38 bp, Artificial Sequence
  primer
gtaaaacgacggccagtgaactctgcctgtttgtttgg

SEQ ID NO: 126540 - DNA, 38 bp, Artificial Sequence
  primer
gtaaaacgacggccagtatgcaacactgtcctggttcc

SEQ ID NO: 126541 - DNA, 40 bp, Artificial Sequence
  primer
gtaaaacgacggccagttgtaaagatgaaccaacacgacc

SEQ ID NO: 126542 - DNA, 36 bp, Artificial Sequence
  primer
gtaaaacgacggccagttttgttgttgctgccattg

SEQ ID NO: 126543 - DNA, 41 bp, Artificial Sequence
  primer
gtaaaacgacggccagtgaaggtttcttagagccatggtag

SEQ ID NO: 126544 - DNA, 21 bp, Artificial Sequence
  primer
ttgcaacagagaagttcggag

SEQ ID NO: 126545 - DNA, 23 bp, Artificial Sequence
  primer
gctttacattgtccaaacactgg

SEQ ID NO: 126546 - DNA, 37 bp, Artificial Sequence
  primer
gtaaaacgacggccagtggaacagctgggttgagttc

SEQ ID NO: 126547 - DNA, 38 bp, Artificial Sequence
  primer
gtaaaacgacggccagtgaatcagcagctgtaagcacc

SEQ ID NO: 126548 - DNA, 37 bp, Artificial Sequence
  primer
gtaaaacgacggccagtaacctcagtgcctcctggac

SEQ ID NO: 126549 - DNA, 19 bp, Artificial Sequence
  primer
gatggaccaggaggtgagg

SEQ ID NO: 126550 - DNA, 21 bp, Artificial Sequence
  primer
tttacacaggagggtgtgtgg

SEQ ID NO: 126551 - DNA, 18 bp, Artificial Sequence
  primer
ccctcagggtcctccctc

SEQ ID NO: 126552 - DNA, 21 bp, Artificial Sequence
  primer
gcagacagaggtacagggcac

SEQ ID NO: 126553 - DNA, 21 bp, Artificial Sequence
  primer
gggtatattgttgcggctgag

SEQ ID NO: 126554 - DNA, 20 bp, Artificial Sequence
  primer
gctggcatttgaacttgagg

SEQ ID NO: 126555 - DNA, 21 bp, Artificial Sequence
  primer
acacattgttccagctcccag

SEQ ID NO: 126556 - DNA, 38 bp, Artificial Sequence
  primer
gtaaaacgacggccagtttgactacagtccctttgcgt

SEQ ID NO: 126557 - DNA, 20 bp, Artificial Sequence
  primer
ctaagggtggcaaaggaagg

SEQ ID NO: 126558 - DNA, 21 bp, Artificial Sequence
  primer
caatctttccctcgaagttgc

SEQ ID NO: 126559 - DNA, 22 bp, Artificial Sequence
  primer
gctaaacagaacgtggactcag

SEQ ID NO: 126560 - DNA, 18 bp, Artificial Sequence
  primer
ggttcacggatgggtgtc

SEQ ID NO: 126561 - DNA, 36 bp, Artificial Sequence
  primer
gtaaaacgacggccagtgtggatgcgcaggaagaag

SEQ ID NO: 126562 - DNA, 36 bp, Artificial Sequence
  primer
gtaaaacgacggccagtgtgaagatccgggaggagg

SEQ ID NO: 126563 - DNA, 38 bp, Artificial Sequence
  primer
gtaaaacgacggccagtccagcccaatccagtctctac

SEQ ID NO: 126564 - DNA, 21 bp, Artificial Sequence
  primer
actgggtaacagcagatgcaa

SEQ ID NO: 126565 - DNA, 36 bp, Artificial Sequence
  primer
gtaaaacgacggccagtcaaagagggaggtgcaagg

SEQ ID NO: 126566 - DNA, 22 bp, Artificial Sequence
  primer
gcccagacacatggaaatttag

SEQ ID NO: 126567 - DNA, 37 bp, Artificial Sequence
  primer
gtaaaacgacggccagttgaacgtctccttgggtcat

SEQ ID NO: 126568 - DNA, 21 bp, Artificial Sequence
  primer
ctcagacccaggagtccagat

SEQ ID NO: 126569 - DNA, 20 bp, Artificial Sequence
  primer
ggatgagcaagacaaggcac

SEQ ID NO: 126570 - DNA, 22 bp, Artificial Sequence
  primer
gctcattcttatcctcctctgg

SEQ ID NO: 126571 - DNA, 36 bp, Artificial Sequence
  primer
gtaaaacgacggccagtgcaggtcaccgtgaagacg

SEQ ID NO: 126572 - DNA, 20 bp, Artificial Sequence
  primer
acctgcagtccacggtgtag

SEQ ID NO: 126573 - DNA, 21 bp, Artificial Sequence
  primer
actcaggattgaacctgcttg

SEQ ID NO: 126574 - DNA, 21 bp, Artificial Sequence
  primer
ttagccctccagtctagtccc

SEQ ID NO: 126575 - DNA, 21 bp, Artificial Sequence
  primer
accagggtacactgcaaatgg

SEQ ID NO: 126576 - DNA, 38 bp, Artificial Sequence
  primer
gtaaaacgacggccagtagggatgggttaaagagggtg

SEQ ID NO: 126577 - DNA, 38 bp, Artificial Sequence
  primer
gtaaaacgacggccagtagcagcaaattccatacatgc

SEQ ID NO: 126578 - DNA, 18 bp, Artificial Sequence
  primer
gggaggcagacggtcttt

SEQ ID NO: 126579 - DNA, 38 bp, Artificial Sequence
  primer
gtaaaacgacggccagtacccttggcaaagcattctac

SEQ ID NO: 126580 - DNA, 38 bp, Artificial Sequence
  primer
gtaaaacgacggccagtgtgagagggctccaggttatc

SEQ ID NO: 126581 - DNA, 38 bp, Artificial Sequence
  primer
gtaaaacgacggccagtagctggctctggaaatagctg

SEQ ID NO: 126582 - DNA, 21 bp, Artificial Sequence
  primer
atggcaggaacctcattgttc

SEQ ID NO: 126583 - DNA, 37 bp, Artificial Sequence
  primer
gtaaaacgacggccagtagtgcaccaaggtgaccctc

SEQ ID NO: 126584 - DNA, 20 bp, Artificial Sequence
  primer
gaatacctgctgtccctccc

SEQ ID NO: 126585 - DNA, 38 bp, Artificial Sequence
  primer
gtaaaacgacggccagtattcagggccacataccactc

SEQ ID NO: 126586 - DNA, 18 bp, Artificial Sequence
  primer
ctgtccgctagagcaggg

SEQ ID NO: 126587 - DNA, 38 bp, Artificial Sequence
  primer
gtaaaacgacggccagttttcacaggctcctctcacag

SEQ ID NO: 126588 - DNA, 38 bp, Artificial Sequence
  primer
gtaaaacgacggccagtctgattcagaagccatggagg

SEQ ID NO: 126589 - DNA, 20 bp, Artificial Sequence
  primer
ggcttggattatcaggtcca

SEQ ID NO: 126590 - DNA, 21 bp, Artificial Sequence
  primer
gccatttgtccaaagtcacac

SEQ ID NO: 126591 - DNA, 38 bp, Artificial Sequence
  primer
gtaaaacgacggccagtgaccttcgtttctatcctggc

SEQ ID NO: 126592 - DNA, 21 bp, Artificial Sequence
  primer
aactccttcccttctgagctg

SEQ ID NO: 126593 - DNA, 38 bp, Artificial Sequence
  primer
gtaaaacgacggccagttgcctaccttgttgggatcag

SEQ ID NO: 126594 - DNA, 38 bp, Artificial Sequence
  primer
gtaaaacgacggccagtgcacagctcatcttgcttgag

SEQ ID NO: 126595 - DNA, 21 bp, Artificial Sequence
  primer
tataatgctactccgcccagg

SEQ ID NO: 126596 - DNA, 38 bp, Artificial Sequence
  primer
gtaaaacgacggccagtaactccttcccttctgagctg

SEQ ID NO: 126597 - DNA, 20 bp, Artificial Sequence
  primer
ggccaccaccttcttggtag

SEQ ID NO: 126598 - DNA, 21 bp, Artificial Sequence
  primer
agactcagttgcatttctggc

SEQ ID NO: 126599 - DNA, 21 bp, Artificial Sequence
  primer
caaagtttggcaacagtggag

SEQ ID NO: 126600 - DNA, 38 bp, Artificial Sequence
  primer
gtaaaacgacggccagtgggctttgtgttcccaaatag

SEQ ID NO: 126601 - DNA, 38 bp, Artificial Sequence
  primer
gtaaaacgacggccagtcctcattagcatgacgtgtcc

SEQ ID NO: 126602 - DNA, 38 bp, Artificial Sequence
  primer
gtaaaacgacggccagtggaaacagcctctgaacatcg

SEQ ID NO: 126603 - DNA, 21 bp, Artificial Sequence
  primer
aggaagggagttctttgctcc

SEQ ID NO: 126604 - DNA, 38 bp, Artificial Sequence
  primer
gtaaaacgacggccagtcctctgaaactggcagagagg

SEQ ID NO: 126605 - DNA, 38 bp, Artificial Sequence
  primer
gtaaaacgacggccagtgagtggcaagttcccaagttc

SEQ ID NO: 126606 - DNA, 36 bp, Artificial Sequence
  primer
gtaaaacgacggccagtgaccacacgaacgaacgag

SEQ ID NO: 126607 - DNA, 24 bp, Artificial Sequence
  primer
tgaacctgcacttaacacattgac

SEQ ID NO: 126608 - DNA, 39 bp, Artificial Sequence
  primer
gtaaaacgacggccagtcctgaaattcctgatttctccc

SEQ ID NO: 126609 - DNA, 37 bp, Artificial Sequence
  primer
gtaaaacgacggccagtagcaacactggtgccagcta

SEQ ID NO: 126610 - DNA, 38 bp, Artificial Sequence
  primer
gtaaaacgacggccagtccacagaatcacagtcagcac

SEQ ID NO: 126611 - DNA, 23 bp, Artificial Sequence
  primer
accttcaagaaactaaagagccc

SEQ ID NO: 126612 - DNA, 38 bp, Artificial Sequence
  primer
gtaaaacgacggccagtctgagaacccaatctgacagg

SEQ ID NO: 126613 - DNA, 22 bp, Artificial Sequence
  primer
ggcattaacaacgcatagtcag

SEQ ID NO: 126614 - DNA, 24 bp, Artificial Sequence
  primer
taggtataggaagggccagaatac

SEQ ID NO: 126615 - DNA, 20 bp, Artificial Sequence
  primer
agccattcaaacacctgctg

SEQ ID NO: 126616 - DNA, 23 bp, Artificial Sequence
  primer
ggcaactgaactgcttctaaatg

SEQ ID NO: 126617 - DNA, 21 bp, Artificial Sequence
  primer
aactcgagccaggtctctgtc

SEQ ID NO: 126618 - DNA, 21 bp, Artificial Sequence
  primer
gaaatgcaaggcaccaataga

SEQ ID NO: 126619 - DNA, 23 bp, Artificial Sequence
  primer
aacctgaaacacacaagtcaagc

SEQ ID NO: 126620 - DNA, 38 bp, Artificial Sequence
  primer
gtaaaacgacggccagtaggcagatgttcatatgtggg

SEQ ID NO: 126621 - DNA, 26 bp, Artificial Sequence
  primer
aatgttgaagagaccagacttacctt

SEQ ID NO: 126622 - DNA, 21 bp, Artificial Sequence
  primer
tgctgatctaatctgggaggg

SEQ ID NO: 126623 - DNA, 20 bp, Artificial Sequence
  primer
cccacatagacagcatccag

SEQ ID NO: 126624 - DNA, 38 bp, Artificial Sequence
  primer
gtaaaacgacggccagtttgttgctatctcatagcccg

SEQ ID NO: 126625 - DNA, 21 bp, Artificial Sequence
  primer
caatgcaagggtagctgattc

SEQ ID NO: 126626 - DNA, 23 bp, Artificial Sequence
  primer
aaactatgaagctgtatgcctgg

SEQ ID NO: 126627 - DNA, 21 bp, Artificial Sequence
  primer
tcaggaaagtagacacagcgg

SEQ ID NO: 126628 - DNA, 21 bp, Artificial Sequence
  primer
catggtggcacacacctgtag

SEQ ID NO: 126629 - DNA, 21 bp, Artificial Sequence
  primer
cagatgacagaagcagccttg

SEQ ID NO: 126630 - DNA, 38 bp, Artificial Sequence
  primer
gtaaaacgacggccagtggaaatcaaagaacctgtggc

SEQ ID NO: 126631 - DNA, 21 bp, Artificial Sequence
  primer
caagacctttgtggctaaggg

SEQ ID NO: 126632 - DNA, 22 bp, Artificial Sequence
  primer
tccgagatgctgatttataccg

SEQ ID NO: 126633 - DNA, 21 bp, Artificial Sequence
  primer
aaatccaaagtcacctgcacc

SEQ ID NO: 126634 - DNA, 37 bp, Artificial Sequence
  primer
gtaaaacgacggccagtgagcatgtccaaattgcctg

SEQ ID NO: 126635 - DNA, 21 bp, Artificial Sequence
  primer
caacattgacggcctttcttc

SEQ ID NO: 126636 - DNA, 22 bp, Artificial Sequence
  primer
tctttgaagccaggcagattag

SEQ ID NO: 126637 - DNA, 21 bp, Artificial Sequence
  primer
tgtcggtgtcgctatgtatcc

SEQ ID NO: 126638 - DNA, 21 bp, Artificial Sequence
  primer
agactccaaccaacagccaac

SEQ ID NO: 126639 - DNA, 38 bp, Artificial Sequence
  primer
gtaaaacgacggccagtgtggagacaacaagctctggg

SEQ ID NO: 126640 - DNA, 21 bp, Artificial Sequence
  primer
tcagctggccttctacagttg

SEQ ID NO: 126641 - DNA, 21 bp, Artificial Sequence
  primer
agtctcccaaagcaccaagtc

SEQ ID NO: 126642 - DNA, 21 bp, Artificial Sequence
  primer
cagaagtcgatggcatcaaag

SEQ ID NO: 126643 - DNA, 35 bp, Artificial Sequence
  primer
gtaaaacgacggccagtcggaatccgggctctaac

SEQ ID NO: 126644 - DNA, 21 bp, Artificial Sequence
  primer
ccaccaatgaccagagagacc

SEQ ID NO: 126645 - DNA, 21 bp, Artificial Sequence
  primer
gggcatctagagccatgtcag

SEQ ID NO: 126646 - DNA, 19 bp, Artificial Sequence
  primer
ctttccatgaccaggctcc

SEQ ID NO: 126647 - DNA, 22 bp, Artificial Sequence
  primer
tgtacaccttgcagtggaactc

SEQ ID NO: 126648 - DNA, 19 bp, Artificial Sequence
  primer
acccaaatcctcacgcaac

SEQ ID NO: 126649 - DNA, 38 bp, Artificial Sequence
  primer
gtaaaacgacggccagttaagtcacaggattcccgtcc

SEQ ID NO: 126650 - DNA, 36 bp, Artificial Sequence
  primer
gtaaaacgacggccagtagagagggctcacacagcc

SEQ ID NO: 126651 - DNA, 38 bp, Artificial Sequence
  primer
gtaaaacgacggccagtcctctgactggtggctgtttc

SEQ ID NO: 126652 - DNA, 20 bp, Artificial Sequence
  primer
cttgtcagtggcatcgtctg

SEQ ID NO: 126653 - DNA, 38 bp, Artificial Sequence
  primer
gtaaaacgacggccagttgtcgaaggagtagtccaggc

SEQ ID NO: 126654 - DNA, 21 bp, Artificial Sequence
  primer
gctgaagcctctccacctctc

SEQ ID NO: 126655 - DNA, 22 bp, Artificial Sequence
  primer
tgtagactcggtcaaacaaggc

SEQ ID NO: 126656 - DNA, 21 bp, Artificial Sequence
  primer
ggtagaaaccacacccaggag

SEQ ID NO: 126657 - DNA, 21 bp, Artificial Sequence
  primer
ttattcgggaacagcctgaag

SEQ ID NO: 126658 - DNA, 36 bp, Artificial Sequence
  primer
gtaaaacgacggccagtcacacctcagcactctggg

SEQ ID NO: 126659 - DNA, 38 bp, Artificial Sequence
  primer
gtaaaacgacggccagtgctgtctctccatctgcactg

SEQ ID NO: 126660 - DNA, 21 bp, Artificial Sequence
  primer
cagacctccgagtcactcctg

SEQ ID NO: 126661 - DNA, 21 bp, Artificial Sequence
  primer
atcctttccagctttgctcag

SEQ ID NO: 126662 - DNA, 38 bp, Artificial Sequence
  primer
gtaaaacgacggccagtgggaagcatctaaggtccaag

SEQ ID NO: 126663 - DNA, 21 bp, Artificial Sequence
  primer
catgcagtttcttctccatgc

SEQ ID NO: 126664 - DNA, 37 bp, Artificial Sequence
  primer
gtaaaacgacggccagtcgcaatcgcttcactcattc

SEQ ID NO: 126665 - DNA, 37 bp, Artificial Sequence
  primer
gtaaaacgacggccagtgttatactcaggccctccgc

SEQ ID NO: 126666 - DNA, 21 bp, Artificial Sequence
  primer
ggtacaggacctccacctctg

SEQ ID NO: 126667 - DNA, 38 bp, Artificial Sequence
  primer
gtaaaacgacggccagtagagactgaccacccaacagg

SEQ ID NO: 126668 - DNA, 38 bp, Artificial Sequence
  primer
gtaaaacgacggccagtgcaaagtgggagacttggttc

SEQ ID NO: 126669 - DNA, 21 bp, Artificial Sequence
  primer
cagacctccgagtcactcctg

SEQ ID NO: 126670 - DNA, 37 bp, Artificial Sequence
  primer
gtaaaacgacggccagttcgaattcctggattcaagc

SEQ ID NO: 126671 - DNA, 21 bp, Artificial Sequence
  primer
cactccacgatcacgtacagg

SEQ ID NO: 126672 - DNA, 20 bp, Artificial Sequence
  primer
agggagaagtcgggacattg

SEQ ID NO: 126673 - DNA, 37 bp, Artificial Sequence
  primer
gtaaaacgacggccagtagtgcagagtcccacaggtc

SEQ ID NO: 126674 - DNA, 38 bp, Artificial Sequence
  primer
gtaaaacgacggccagtcccagaccaaatctgaaggag

SEQ ID NO: 126675 - DNA, 20 bp, Artificial Sequence
  primer
aggaggacgaggagttgttg

SEQ ID NO: 126676 - DNA, 21 bp, Artificial Sequence
  primer
ctgaagacagaatcgctggag

SEQ ID NO: 126677 - DNA, 20 bp, Artificial Sequence
  primer
gagcactgtgtcaggctgtg

SEQ ID NO: 126678 - DNA, 19 bp, Artificial Sequence
  primer
cactgtggcagggttcagg

SEQ ID NO: 126679 - DNA, 35 bp, Artificial Sequence
  primer
gtaaaacgacggccagtaaggaaggctttctgccg

SEQ ID NO: 126680 - DNA, 38 bp, Artificial Sequence
  primer
gtaaaacgacggccagtatcttggagggctgtgtgaag

SEQ ID NO: 126681 - DNA, 20 bp, Artificial Sequence
  primer
agctgtagcccatggtgttg

SEQ ID NO: 126682 - DNA, 38 bp, Artificial Sequence
  primer
gtaaaacgacggccagtccgacacaaagaccaggagag

SEQ ID NO: 126683 - DNA, 20 bp, Artificial Sequence
  primer
atcctcccagtctgcctgtc

SEQ ID NO: 126684 - DNA, 21 bp, Artificial Sequence
  primer
ccagttcacacacaaagggag

SEQ ID NO: 126685 - DNA, 21 bp, Artificial Sequence
  primer
caatgccacaggtagttggac

SEQ ID NO: 126686 - DNA, 25 bp, Artificial Sequence
  primer
ggacttcaaagtagcagcgtctatc

SEQ ID NO: 126687 - DNA, 41 bp, Artificial Sequence
  primer
gtaaaacgacggccagttgtcactgggatattataaatggg

SEQ ID NO: 126688 - DNA, 42 bp, Artificial Sequence
  primer
gtaaaacgacggccagtgggtagccactttctaaactattcc

SEQ ID NO: 126689 - DNA, 38 bp, Artificial Sequence
  primer
gtaaaacgacggccagttgagctacggttcacaaggtg

SEQ ID NO: 126690 - DNA, 21 bp, Artificial Sequence
  primer
gatgtgctgtttgcatttgtc

SEQ ID NO: 126691 - DNA, 25 bp, Artificial Sequence
  primer
ttatccacttccagtttcaaagaac

SEQ ID NO: 126692 - DNA, 22 bp, Artificial Sequence
  primer
ttccattgaaggctaaatgtcc

SEQ ID NO: 126693 - DNA, 20 bp, Artificial Sequence
  primer
aaggcaggtcttctggcttg

SEQ ID NO: 126694 - DNA, 21 bp, Artificial Sequence
  primer
tgtttgggcattgatatctgc

SEQ ID NO: 126695 - DNA, 39 bp, Artificial Sequence
  primer
gtaaaacgacggccagttgacgtcaactttgattatggg

SEQ ID NO: 126696 - DNA, 21 bp, Artificial Sequence
  primer
accttgtgatccacccatctc

SEQ ID NO: 126697 - DNA, 25 bp, Artificial Sequence
  primer
cctgaaataactagcaccatcactg

SEQ ID NO: 126698 - DNA, 38 bp, Artificial Sequence
  primer
gtaaaacgacggccagtatttgtggtaccaaagcgacc

SEQ ID NO: 126699 - DNA, 25 bp, Artificial Sequence
  primer
caattattgaattagttccattgcc

SEQ ID NO: 126700 - DNA, 38 bp, Artificial Sequence
  primer
gtaaaacgacggccagtgcatttctgctgtcagtggag

SEQ ID NO: 126701 - DNA, 22 bp, Artificial Sequence
  primer
aaacgacttcattgctgaagaa

SEQ ID NO: 126702 - DNA, 38 bp, Artificial Sequence
  primer
gtaaaacgacggccagtattgcgcatggatatgttcag

SEQ ID NO: 126703 - DNA, 21 bp, Artificial Sequence
  primer
taacaacagtccgtttctgcc

SEQ ID NO: 126704 - DNA, 38 bp, Artificial Sequence
  primer
gtaaaacgacggccagtatttgttcttggctgggacac

SEQ ID NO: 126705 - DNA, 37 bp, Artificial Sequence
  primer
gtaaaacgacggccagttgcttgcaagtaggtctggc

SEQ ID NO: 126706 - DNA, 38 bp, Artificial Sequence
  primer
gtaaaacgacggccagtgtaatgcatctccagctgtgc

SEQ ID NO: 126707 - DNA, 38 bp, Artificial Sequence
  primer
gtaaaacgacggccagtggcttaaagtgcttgggtctg

SEQ ID NO: 126708 - DNA, 39 bp, Artificial Sequence
  primer
gtaaaacgacggccagtagcataagaacctagccgtcag

SEQ ID NO: 126709 - DNA, 38 bp, Artificial Sequence
  primer
gtaaaacgacggccagtctaagggcaagttcgcatctc

SEQ ID NO: 126710 - DNA, 21 bp, Artificial Sequence
  primer
ctggagcattctgaggctagg

SEQ ID NO: 126711 - DNA, 39 bp, Artificial Sequence
  primer
gtaaaacgacggccagtggagcaatgacttgtccaagag

SEQ ID NO: 126712 - DNA, 38 bp, Artificial Sequence
  primer
gtaaaacgacggccagtttctcctctgccctagtctgg

SEQ ID NO: 126713 - DNA, 21 bp, Artificial Sequence
  primer
gcttggtagtcccttcccttc

SEQ ID NO: 126714 - DNA, 36 bp, Artificial Sequence
  primer
gtaaaacgacggccagtgctcggaggctgtcttgtc

SEQ ID NO: 126715 - DNA, 21 bp, Artificial Sequence
  primer
acacacctggtcccttagtgg

SEQ ID NO: 126716 - DNA, 20 bp, Artificial Sequence
  primer
aggcgtttgaagggacagag

SEQ ID NO: 126717 - DNA, 38 bp, Artificial Sequence
  primer
gtaaaacgacggccagtacctggagtgaggaagggttc

SEQ ID NO: 126718 - DNA, 21 bp, Artificial Sequence
  primer
gggtctctgtcagtcaaaggg

SEQ ID NO: 126719 - DNA, 21 bp, Artificial Sequence
  primer
ctttggaagaacagctctggg

SEQ ID NO: 126720 - DNA, 36 bp, Artificial Sequence
  primer
gtaaaacgacggccagtgaatctctcccgccaagtc

SEQ ID NO: 126721 - DNA, 38 bp, Artificial Sequence
  primer
gtaaaacgacggccagttattcaaagcgatggctcaaa

SEQ ID NO: 126722 - DNA, 38 bp, Artificial Sequence
  primer
gtaaaacgacggccagtccagagcatatcgtcatccag

SEQ ID NO: 126723 - DNA, 43 bp, Artificial Sequence
  primer
gtaaaacgacggccagtaagaaccataagaagccttatccatt

SEQ ID NO: 126724 - DNA, 42 bp, Artificial Sequence
  primer
gtaaaacgacggccagtgctagtcagatttcaaggatgacac

SEQ ID NO: 126725 - DNA, 24 bp, Artificial Sequence
  primer
caagaattcaagacaggaacactc

SEQ ID NO: 126726 - DNA, 21 bp, Artificial Sequence
  primer
cacagacatgctggaacagtg

SEQ ID NO: 126727 - DNA, 21 bp, Artificial Sequence
  primer
gtcacccaactacccaatgtg

SEQ ID NO: 126728 - DNA, 39 bp, Artificial Sequence
  primer
gtaaaacgacggccagttgctgttctcaaacactgatcc

SEQ ID NO: 126729 - DNA, 23 bp, Artificial Sequence
  primer
cagtttcctttcaaacttatccg

SEQ ID NO: 126730 - DNA, 21 bp, Artificial Sequence
  primer
aagtgggagggagatggattc

SEQ ID NO: 126731 - DNA, 21 bp, Artificial Sequence
  primer
aaacaatcacatctgccctcc

SEQ ID NO: 126732 - DNA, 39 bp, Artificial Sequence
  primer
gtaaaacgacggccagtatgtgctgcatatgactcgttg

SEQ ID NO: 126733 - DNA, 38 bp, Artificial Sequence
  primer
gtaaaacgacggccagtattgccactttccaagtctgg

SEQ ID NO: 126734 - DNA, 38 bp, Artificial Sequence
  primer
gtaaaacgacggccagttctgagagtgcagcctctttc

SEQ ID NO: 126735 - DNA, 20 bp, Artificial Sequence
  primer
gctgggaaatcctaacagcc

SEQ ID NO: 126736 - DNA, 21 bp, Artificial Sequence
  primer
tgataagcaagcccacatcac

SEQ ID NO: 126737 - DNA, 21 bp, Artificial Sequence
  primer
gtggaagtgctctgcaaactg

SEQ ID NO: 126738 - DNA, 37 bp, Artificial Sequence
  primer
gtaaaacgacggccagtctttgtggatgaaaccgacg

SEQ ID NO: 126739 - DNA, 38 bp, Artificial Sequence
  primer
gtaaaacgacggccagtgaaattcactttgctgcaggg

SEQ ID NO: 126740 - DNA, 37 bp, Artificial Sequence
  primer
gtaaaacgacggccagtagctcaactcctttctcccg

SEQ ID NO: 126741 - DNA, 38 bp, Artificial Sequence
  primer
gtaaaacgacggccagtgcttcagcacaaaccacagag

SEQ ID NO: 126742 - DNA, 39 bp, Artificial Sequence
  primer
gtaaaacgacggccagttgtctggaaccaagtcaatgtg

SEQ ID NO: 126743 - DNA, 21 bp, Artificial Sequence
  primer
agaatgtaaggcaggacaggc

SEQ ID NO: 126744 - DNA, 21 bp, Artificial Sequence
  primer
gtgttcagagccttagggagg

SEQ ID NO: 126745 - DNA, 21 bp, Artificial Sequence
  primer
gtggctggaagaaaccagaag

SEQ ID NO: 126746 - DNA, 38 bp, Artificial Sequence; identical to SEQ ID NO: 126741
  primer

SEQ ID NO: 126747 - DNA, 19 bp, Artificial Sequence
  primer
actgaatgtttgggcaccg

SEQ ID NO: 126748 - DNA, 21 bp, Artificial Sequence
  primer
gccttgttcaagcttccaatc

SEQ ID NO: 126749 - DNA, 37 bp, Artificial Sequence
  primer
gtaaaacgacggccagtcctcatggacccatcctttg

SEQ ID NO: 126750 - DNA, 21 bp, Artificial Sequence
  primer
gaaacatgctgtgtatgcagg

SEQ ID NO: 126751 - DNA, 21 bp, Artificial Sequence
  primer
ggtatgtcactccaccctgtg

SEQ ID NO: 126752 - DNA, 22 bp, Artificial Sequence
  primer
caacctcacccaataccacatc

SEQ ID NO: 126753 - DNA, 21 bp, Artificial Sequence
  primer
gtcagggagtaccagtttggg

SEQ ID NO: 126754 - DNA, 21 bp, Artificial Sequence
  primer
gtagtggctggagcttgactg

SEQ ID NO: 126755 - DNA, 26 bp, Artificial Sequence
  primer
aagtacacggaagaagattgagagag

SEQ ID NO: 126756 - DNA, 44 bp, Artificial Sequence
  primer
gtaaaacgacggccagttgggtgtgttgattacagatataacat

SEQ ID NO: 126757 - DNA, 40 bp, Artificial Sequence
  primer
gtaaaacgacggccagtcacccacttgtgtttatctcaaa

SEQ ID NO: 126758 - DNA, 22 bp, Artificial Sequence
  primer
tgcaaggagagttgtctttgtg

SEQ ID NO: 126759 - DNA, 36 bp, Artificial Sequence
  primer
gtaaaacgacggccagtactcgctccagcctcttcc

SEQ ID NO: 126760 - DNA, 37 bp, Artificial Sequence
  primer
gtaaaacgacggccagtatggctcaggctagtgatcg

SEQ ID NO: 126761 - DNA, 21 bp, Artificial Sequence
  primer
gggagaggaaggagcacatac

SEQ ID NO: 126762 - DNA, 21 bp, Artificial Sequence
  primer
agctctggtagttgtggtcgg

SEQ ID NO: 126763 - DNA, 38 bp, Artificial Sequence
  primer
gtaaaacgacggccagttccatccacaaagagcatcag

SEQ ID NO: 126764 - DNA, 21 bp, Artificial Sequence
  primer
actcccttccagctcactttg

SEQ ID NO: 126765 - DNA, 38 bp, Artificial Sequence
  primer
gtaaaacgacggccagtcagaaagtggagcagtcatgg

SEQ ID NO: 126766 - DNA, 38 bp, Artificial Sequence
  primer
gtaaaacgacggccagtgataagaaggcaaggctgagg

SEQ ID NO: 126767 - DNA, 21 bp, Artificial Sequence
  primer
gttaacgtgtatgcaggtggg

SEQ ID NO: 126768 - DNA, 35 bp, Artificial Sequence
  primer
gtaaaacgacggccagtgtcagggcctgtcagctc

SEQ ID NO: 126769 - DNA, 20 bp, Artificial Sequence
  primer
agagagaaagcacgcgtttg

SEQ ID NO: 126770 - DNA, 38 bp, Artificial Sequence
  primer
gtaaaacgacggccagtaaagggaaggagctgtcagtg

SEQ ID NO: 126771 - DNA, 21 bp, Artificial Sequence
  primer
cccagcctccacagactctac

SEQ ID NO: 126772 - DNA, 21 bp, Artificial Sequence
  primer
ctcaaagaggtgttccagtcg

SEQ ID NO: 126773 - DNA, 38 bp, Artificial Sequence
  primer
gtaaaacgacggccagttcctttctttgccttggtttc

SEQ ID NO: 126774 - DNA, 37 bp, Artificial Sequence
  primer
gtaaaacgacggccagtgacaggaaatgcccacctac

SEQ ID NO: 126775 - DNA, 21 bp, Artificial Sequence
  primer
tcaggtcaaacagtggctcag

SEQ ID NO: 126776 - DNA, 21 bp, Artificial Sequence
  primer
cgtgtccttcacctctgacac

SEQ ID NO: 126777 - DNA, 21 bp, Artificial Sequence
  primer
aaagagcatttctggcagagg

SEQ ID NO: 126778 - DNA, 38 bp, Artificial Sequence
  primer
gtaaaacgacggccagttagcccaggtagagcaggaag

SEQ ID NO: 126779 - DNA, 38 bp, Artificial Sequence
  primer
gtaaaacgacggccagtaaagaagaagggtgagctggg

SEQ ID NO: 126780 - DNA, 21 bp, Artificial Sequence
  primer
gaggaaggccagatagcaaag

SEQ ID NO: 126781 - DNA, 21 bp, Artificial Sequence
  primer
cttcaacgtccttctcactgc

SEQ ID NO: 126782 - DNA, 38 bp, Artificial Sequence
  primer
gtaaaacgacggccagtacggctaatactgctcaaggc

SEQ ID NO: 126783 - DNA, 35 bp, Artificial Sequence
  primer
gtaaaacgacggccagtgatttgccctcgagcgat

SEQ ID NO: 126784 - DNA, 38 bp, Artificial Sequence
  primer
gtaaaacgacggccagtcaaagccatggtagttcctcc

SEQ ID NO: 126785 - DNA, 21 bp, Artificial Sequence
  primer
aggaagctggaatgaaacagg

SEQ ID NO: 126786 - DNA, 22 bp, Artificial Sequence
  primer
caagtacaggtagaagcttgcc

SEQ ID NO: 126787 - DNA, 21 bp, Artificial Sequence
  primer
gccaaagggtgtctttaccac

SEQ ID NO: 126788 - DNA, 24 bp, Artificial Sequence
  primer
cctcatttatactgtaacggcttg

SEQ ID NO: 126789 - DNA, 21 bp, Artificial Sequence
  primer
aacgtttcttgcagtgggaag

SEQ ID NO: 126790 - DNA, 21 bp, Artificial Sequence
  primer
caaataagcccacaagcacag

SEQ ID NO: 126791 - DNA, 21 bp, Artificial Sequence
  primer
taaagtaggcgccatctcagc

SEQ ID NO: 126792 - DNA, 38 bp, Artificial Sequence
  primer
gtaaaacgacggccagttgtttggctggtggtttaatg

SEQ ID NO: 126793 - DNA, 39 bp, Artificial Sequence
  primer
gtaaaacgacggccagtttcggacaatgttctgtaaagg

SEQ ID NO: 126794 - DNA, 21 bp, Artificial Sequence
  primer
ccagatccagcctatttcagg

SEQ ID NO: 126795 - DNA, 21 bp, Artificial Sequence
  primer
acacttaaccatgatggcacc

SEQ ID NO: 126796 - DNA, 22 bp, Artificial Sequence
  primer
tgaaatcatcactactgccctg

SEQ ID NO: 126797 - DNA, 22 bp, Artificial Sequence
  primer
caagctcttagagaaccagccc

SEQ ID NO: 126798 - DNA, 20 bp, Artificial Sequence
  primer
ttctgggaccttgtcattgg

SEQ ID NO: 126799 - DNA, 38 bp, Artificial Sequence
  primer
gtaaaacgacggccagttcattccagaacaaacggatg

SEQ ID NO: 126800 - DNA, 38 bp, Artificial Sequence
  primer
gtaaaacgacggccagtgtccaccttaatgggttccag

SEQ ID NO: 126801 - DNA, 38 bp, Artificial Sequence
  primer
gtaaaacgacggccagtcctacacctagcatgtggcag

SEQ ID NO: 126802 - DNA, 37 bp, Artificial Sequence
  primer
gtaaaacgacggccagtttgaaatgtggacatgcagc

SEQ ID NO: 126803 - DNA, 21 bp, Artificial Sequence
  primer
ccgtaccctatgccaagaatg

SEQ ID NO: 126804 - DNA, 39 bp, Artificial Sequence
  primer
gtaaaacgacggccagtgggaacctgaggtacaaccttc

SEQ ID NO: 126805 - DNA, 21 bp, Artificial Sequence
  primer
cctcgaggatgaccgataaag

SEQ ID NO: 126806 - DNA, 38 bp, Artificial Sequence
  primer
gtaaaacgacggccagtaaccatcggctcttaatttcc

SEQ ID NO: 126807 - DNA, 21 bp, Artificial Sequence
  primer
tttcacagaaatggtggagga

SEQ ID NO: 126808 - DNA, 21 bp, Artificial Sequence
  primer
tgtgtgtggttaggttggcac

SEQ ID NO: 126809 - DNA, 38 bp, Artificial Sequence
  primer
gtaaaacgacggccagtgagctgtgtctccacctttcc

SEQ ID NO: 126810 - DNA, 21 bp, Artificial Sequence
  primer
cgatggagaaggtatgtgcag

SEQ ID NO: 126811 - DNA, 37 bp, Artificial Sequence
  primer
gtaaaacgacggccagtaccgaacctcgagttcaagc

SEQ ID NO: 126812 - DNA, 18 bp, Artificial Sequence
  primer
agctcctgctcctggtcg

SEQ ID NO: 126813 - DNA, 20 bp, Artificial Sequence
  primer
ctgagcttcatgggcttgtc

SEQ ID NO: 126814 - DNA, 38 bp, Artificial Sequence
  primer
gtaaaacgacggccagttcctcatctggagaatggacc

SEQ ID NO: 126815 - DNA, 19 bp, Artificial Sequence
  primer
cccgggttcaggtacacag

SEQ ID NO: 126816 - DNA, 21 bp, Artificial Sequence
  primer
atgcatgacacctgtgagctg

SEQ ID NO: 126817 - DNA, 38 bp, Artificial Sequence
  primer
gtaaaacgacggccagtcaggcctctgattgtgatgtg

SEQ ID NO: 126818 - DNA, 37 bp, Artificial Sequence
  primer
gtaaaacgacggccagttcacgaaagagtgaggtggg

SEQ ID NO: 126819 - DNA, 37 bp, Artificial Sequence
  primer
gtaaaacgacggccagtccctaaaggatgcccaagtc

SEQ ID NO: 126820 - DNA, 21 bp, Artificial Sequence
  primer
ttctgatggctgggtaaatcc

SEQ ID NO: 126821 - DNA, 21 bp, Artificial Sequence
  primer
cacaatcagaggctggaactg

SEQ ID NO: 126822 - DNA, 38 bp, Artificial Sequence
  primer
gtaaaacgacggccagttcaggaggtcagaaggtttgg

SEQ ID NO: 126823 - DNA, 38 bp, Artificial Sequence
  primer
gtaaaacgacggccagtggcctgtgggagaaactactg

SEQ ID NO: 126824 - DNA, 20 bp, Artificial Sequence
  primer
agagaagacgcccagctttc

SEQ ID NO: 126825 - DNA, 38 bp, Artificial Sequence
  primer
gtaaaacgacggccagtattgtttatgagctgctcccg

SEQ ID NO: 126826 - DNA, 21 bp, Artificial Sequence
  primer
ctgattcaggaagaaccgcac

SEQ ID NO: 126827 - DNA, 38 bp, Artificial Sequence
  primer
gtaaaacgacggccagtgcttctaagagggagagccag

SEQ ID NO: 126828 - DNA, 21 bp, Artificial Sequence
  primer
agccactgtacacatccatcc

SEQ ID NO: 126829 - DNA, 21 bp, Artificial Sequence
  primer
gagagatggagtgacatgccc

SEQ ID NO: 126830 - DNA, 41 bp, Artificial Sequence
  primer
gtaaaacgacggccagtagtccactactaggatggttctgc

SEQ ID NO: 126831 - DNA, 18 bp, Artificial Sequence
  primer
cacgtgtctgccctacgc

SEQ ID NO: 126832 - DNA, 40 bp, Artificial Sequence
  primer
gtaaaacgacggccagttcagccgtgtaaacttggataag

SEQ ID NO: 126833 - DNA, 21 bp, Artificial Sequence
  primer
acaagctcataccactgagcg

SEQ ID NO: 126834 - DNA, 44 bp, Artificial Sequence
  primer
gtaaaacgacggccagtctaagtactcaataacggttgctgcta

SEQ ID NO: 126835 - DNA, 36 bp, Artificial Sequence
  primer
gtaaaacgacggccagtagggactcaggcaccaagg

SEQ ID NO: 126836 - DNA, 21 bp, Artificial Sequence
  primer
aaacagtgacagcaacttggc

SEQ ID NO: 126837 - DNA, 20 bp, Artificial Sequence
  primer
cattctcctgacaagctggg

SEQ ID NO: 126838 - DNA, 38 bp, Artificial Sequence
  primer
gtaaaacgacggccagtatcacttggcacagtgtctcg

SEQ ID NO: 126839 - DNA, 37 bp, Artificial Sequence
  primer
gtaaaacgacggccagtccacccaaaggctttcatta

SEQ ID NO: 126840 - DNA, 25 bp, Artificial Sequence
  primer
tcatacttgtggaagtctgaaacag

SEQ ID NO: 126841 - DNA, 19 bp, Artificial Sequence
  primer
agatcacaccgtgccactc

SEQ ID NO: 126842 - DNA, 21 bp, Artificial Sequence
  primer
catattcctgagatgggagcc

SEQ ID NO: 126843 - DNA, 21 bp, Artificial Sequence
  primer
ctgaactgtttgtcagagccg

SEQ ID NO: 126844 - DNA, 21 bp, Artificial Sequence
  primer
gtcagagccctactggactgg

SEQ ID NO: 126845 - DNA, 38 bp, Artificial Sequence
  primer
gtaaaacgacggccagtaatgacagccttcaccaggtc

SEQ ID NO: 126846 - DNA, 21 bp, Artificial Sequence
  primer
tccagttgcatcagaaattcg

SEQ ID NO: 126847 - DNA, 38 bp, Artificial Sequence
  primer
gtaaaacgacggccagtaggctgaatcttgcagaaagc

SEQ ID NO: 126848 - DNA, 40 bp, Artificial Sequence
  primer
gtaaaacgacggccagtggctctattccctatgtagcagg

SEQ ID NO: 126849 - DNA, 22 bp, Artificial Sequence
  primer
caaagacagtggcctccttatg

SEQ ID NO: 126850 - DNA, 21 bp, Artificial Sequence
  primer
cctttgggccattatcttctg

SEQ ID NO: 126851 - DNA, 21 bp, Artificial Sequence
  primer
tggatgtgctggttctgtagg

SEQ ID NO: 126852 - DNA, 38 bp, Artificial Sequence
  primer
gtaaaacgacggccagtgttgctgacaccttgcaacag

SEQ ID NO: 126853 - DNA, 21 bp, Artificial Sequence
  primer
gcaaagctgtgtcatgtctgc

SEQ ID NO: 126854 - DNA, 21 bp, Artificial Sequence
  primer
tgccttgattccaagtatccc

SEQ ID NO: 126855 - DNA, 41 bp, Artificial Sequence
  primer
gtaaaacgacggccagtgcttacgtatcaggtaatcactgg

SEQ ID NO: 126856 - DNA, 43 bp, Artificial Sequence
  primer
gtaaaacgacggccagtccataaagttcattactcagagaggg

SEQ ID NO: 126857 - DNA, 41 bp, Artificial Sequence
  primer
gtaaaacgacggccagtgcatgtaaatggaagaatgtgaag

SEQ ID NO: 126858 - DNA, 22 bp, Artificial Sequence
  primer
gctgaaagactgatccctgaag

SEQ ID NO: 126859 - DNA, 38 bp, Artificial Sequence
  primer
gtaaaacgacggccagttcctcttgcagcttcttcctc

SEQ ID NO: 126860 - DNA, 38 bp, Artificial Sequence
  primer
gtaaaacgacggccagtcaaccagcatcacggtaaatg

SEQ ID NO: 126861 - DNA, 24 bp, Artificial Sequence
  primer
tcaatttgcctatcaactcatctc

SEQ ID NO: 126862 - DNA, 38 bp, Artificial Sequence
  primer
gtaaaacgacggccagtgctcacaacctcacccttctc

SEQ ID NO: 126863 - DNA, 38 bp, Artificial Sequence
  primer
gtaaaacgacggccagttcctggaaggatttccgtatg

SEQ ID NO: 126864 - DNA, 38 bp, Artificial Sequence
  primer
gtaaaacgacggccagttttctcctgagtgatggaggg

SEQ ID NO: 126865 - DNA, 21 bp, Artificial Sequence
  primer
gctggtgctgctgatgtagac

SEQ ID NO: 126866 - DNA, 38 bp, Artificial Sequence
  primer
gtaaaacgacggccagtgttgtgaccggtgttatggtg

SEQ ID NO: 126867 - DNA, 38 bp, Artificial Sequence
  primer
gtaaaacgacggccagtggtagcatgagaagcatgtgg

SEQ ID NO: 126868 - DNA, 21 bp, Artificial Sequence
  primer
actggcacaaacagatgaagg

SEQ ID NO: 126869 - DNA, 18 bp, Artificial Sequence
  primer
ccggacaggactcccaac

SEQ ID NO: 126870 - DNA, 41 bp, Artificial Sequence
  primer
gtaaaacgacggccagtcacacaacctgtgtaataggcatc

SEQ ID NO: 126871 - DNA, 24 bp, Artificial Sequence
  primer
cgtaagattaggtcctgaaactgg

SEQ ID NO: 126872 - DNA, 21 bp, Artificial Sequence
  primer
aatgccagcttgctttctatg

SEQ ID NO: 126873 - DNA, 42 bp, Artificial Sequence
  primer
gtaaaacgacggccagtcaaccactgagagtttgatataggc

SEQ ID NO: 126874 - DNA, 38 bp, Artificial Sequence
  primer
gtaaaacgacggccagtgaagtgggaggatggtttgag

SEQ ID NO: 126875 - DNA, 42 bp, Artificial Sequence
  primer
gtaaaacgacggccagtgccaccagtaagatttaataatccc

SEQ ID NO: 126876 - DNA, 24 bp, Artificial Sequence
  primer
tttatagggaagcgatttatttgg

SEQ ID NO: 126877 - DNA, 21 bp, Artificial Sequence
  primer
gtcccttgagtagtggcatgg

SEQ ID NO: 126878 - DNA, 39 bp, Artificial Sequence
  primer
gtaaaacgacggccagtccgcacttcacttcttgcttac

SEQ ID NO: 126879 - DNA, 38 bp, Artificial Sequence
  primer
gtaaaacgacggccagtagcaagacaagtgctgggttt

SEQ ID NO: 126880 - DNA, 45 bp, Artificial Sequence
  primer
gtaaaacgacggccagtcagcatagcactatgactatctattgaa

SEQ ID NO: 126881 - DNA, 24 bp, Artificial Sequence
  primer
tctgtttcagtgtgaatctgttga

SEQ ID NO: 126882 - DNA, 21 bp, Artificial Sequence
  primer
ttgatatcgggctacaggtcc

SEQ ID NO: 126883 - DNA, 24 bp, Artificial Sequence
  primer
ggcagatacatagaccactcattc

SEQ ID NO: 126884 - DNA, 24 bp, Artificial Sequence
  primer
tttcctatgtactccctgagcatc

SEQ ID NO: 126885 - DNA, 22 bp, Artificial Sequence
  primer
ccaagcaagactggttcatagg

SEQ ID NO: 126886 - DNA, 39 bp, Artificial Sequence
  primer
gtaaaacgacggccagttcattcacattcctttcttgga

SEQ ID NO: 126887 - DNA, 22 bp, Artificial Sequence
  primer
cagctagcatgcagaactgttg

SEQ ID NO: 126888 - DNA, 19 bp, Artificial Sequence
  primer
gagcaaacgtgcattctgg

SEQ ID NO: 126889 - DNA, 20 bp, Artificial Sequence
  primer
cactacaactcccaggagcc

SEQ ID NO: 126890 - DNA, 21 bp, Artificial Sequence
  primer
acaactcagaggtgcctggac

SEQ ID NO: 126891 - DNA, 21 bp, Artificial Sequence
  primer
ctctgatcttccctcggagtc

SEQ ID NO: 126892 - DNA, 21 bp, Artificial Sequence
  primer
gggctctaagaactggaaggg

SEQ ID NO: 126893 - DNA, 21 bp, Artificial Sequence
  primer
ggagaacagggaaaggacagc

SEQ ID NO: 126894 - DNA, 38 bp, Artificial Sequence
  primer
gtaaaacgacggccagtgcctcattgtccagaaagacc

SEQ ID NO: 126895 - DNA, 38 bp, Artificial Sequence
  primer
gtaaaacgacggccagtagcggctcgttatacttgtcc

SEQ ID NO: 126896 - DNA, 37 bp, Artificial Sequence
  primer
gtaaaacgacggccagttttagacacctttgcgggtg

SEQ ID NO: 126897 - DNA, 38 bp, Artificial Sequence
  primer
gtaaaacgacggccagtgaggcaacaaggaaacaggac

SEQ ID NO: 126898 - DNA, 38 bp, Artificial Sequence
  primer
gtaaaacgacggccagtgggcaagtcactcctcatctc

SEQ ID NO: 126899 - DNA, 37 bp, Artificial Sequence
  primer
gtaaaacgacggccagtaaatgaggtggaggtgggag

SEQ ID NO: 126900 - DNA, 21 bp, Artificial Sequence
  primer
gccctcgtgcagtatacaacc

SEQ ID NO: 126901 - DNA, 38 bp, Artificial Sequence
  primer
gtaaaacgacggccagtgtattgtaggtgtggttgcgg

SEQ ID NO: 126902 - DNA, 21 bp, Artificial Sequence
  primer
gggtgaccagatgtaagctgc

SEQ ID NO: 126903 - DNA, 19 bp, Artificial Sequence
  primer
aggaccaagagggaggagc

SEQ ID NO: 126904 - DNA, 20 bp, Artificial Sequence
  primer
gtgagctgagagcacaccac

SEQ ID NO: 126905 - DNA, 38 bp, Artificial Sequence
  primer
gtaaaacgacggccagtgtcttcttcctcgatgcttcc

SEQ ID NO: 126906 - DNA, 38 bp, Artificial Sequence
  primer
gtaaaacgacggccagtaccagagatgtctcctctgcc

SEQ ID NO: 126907 - DNA, 21 bp, Artificial Sequence
  primer
tcttccaaagatcccgttctc

SEQ ID NO: 126908 - DNA, 21 bp, Artificial Sequence
  primer
aagccaaagctgacgtgtttc

SEQ ID NO: 126909 - DNA, 38 bp, Artificial Sequence
  primer
gtaaaacgacggccagtcatcctcaattgacctttccc

SEQ ID NO: 126910 - DNA, 20 bp, Artificial Sequence
  primer
ccagcaaaggtgtccatctc

SEQ ID NO: 126911 - DNA, 21 bp, Artificial Sequence
  primer
agttactggctgctggaggtc

SEQ ID NO: 126912 - DNA, 21 bp, Artificial Sequence
  primer
ctcattcccactttcaaaggc

SEQ ID NO: 126913 - DNA, 21 bp, Artificial Sequence
  primer
accaggtacaggccacctttc

SEQ ID NO: 126914 - DNA, 21 bp, Artificial Sequence
  primer
acattacggccttaaactggc

SEQ ID NO: 126915 - DNA, 40 bp, Artificial Sequence
  primer
gtaaaacgacggccagtaaagtccactttcaaagcatcag

SEQ ID NO: 126916 - DNA, 23 bp, Artificial Sequence
  primer
aaacaaagcaagaaagaacattg

SEQ ID NO: 126917 - DNA, 36 bp, Artificial Sequence
  primer
gtaaaacgacggccagtgtagtgcaccacgcaggtc

SEQ ID NO: 126918 - DNA, 21 bp, Artificial Sequence
  primer
cagtttcctcatctgtgcagc

SEQ ID NO: 126919 - DNA, 21 bp, Artificial Sequence
  primer
ggtattggtcagatgggatgg

SEQ ID NO: 126920 - DNA, 37 bp, Artificial Sequence
  primer
gtaaaacgacggccagtaggagcaaaggcagtgaagg

SEQ ID NO: 126921 - DNA, 35 bp, Artificial Sequence
  primer
gtaaaacgacggccagtacgccacctccgaatcag

SEQ ID NO: 126922 - DNA, 21 bp, Artificial Sequence
  primer
gactggctgggaggagtagag

SEQ ID NO: 126923 - DNA, 21 bp, Artificial Sequence
  primer
gtctgtgagtgggtgaaggtg

SEQ ID NO: 126924 - DNA, 38 bp, Artificial Sequence
  primer
gtaaaacgacggccagtgagaatggatgatgccatgag

SEQ ID NO: 126925 - DNA, 21 bp, Artificial Sequence
  primer
gagaaccagactcccaagcac

SEQ ID NO: 126926 - DNA, 37 bp, Artificial Sequence
  primer
gtaaaacgacggccagtcttgcctcccacagcttacc

SEQ ID NO: 126927 - DNA, 21 bp, Artificial Sequence
  primer
tggatacggtgaagaccaatg

SEQ ID NO: 126928 - DNA, 21 bp, Artificial Sequence
  primer
ttacagctcagttcgtcgctc

SEQ ID NO: 126929 - DNA, 20 bp, Artificial Sequence
  primer
agtcgggaaaggagaaggtg

SEQ ID NO: 126930 - DNA, 21 bp, Artificial Sequence
  primer
gaatgtatgggcatctccagg

SEQ ID NO: 126931 - DNA, 39 bp, Artificial Sequence
  primer
gtaaaacgacggccagtgctccaacacattcaacaaatc

SEQ ID NO: 126932 - DNA, 21 bp, Artificial Sequence
  primer
ggtcgtattcaaccacccttc

SEQ ID NO: 126933 - DNA, 38 bp, Artificial Sequence
  primer
gtaaaacgacggccagtctactcatctgtctgccaccc

SEQ ID NO: 126934 - DNA, 38 bp, Artificial Sequence
  primer
gtaaaacgacggccagtcccaatctgtcagactccaaa

SEQ ID NO: 126935 - DNA, 21 bp, Artificial Sequence
  primer
gcctattggaggtgctgacac

SEQ ID NO: 126936 - DNA, 39 bp, Artificial Sequence
  primer
gtaaaacgacggccagtaagctgggaccaagtaaacaaa

SEQ ID NO: 126937 - DNA, 36 bp, Artificial Sequence
  primer
gtaaaacgacggccagtcctcggtgccttaaacgac

SEQ ID NO: 126938 - DNA, 39 bp, Artificial Sequence
  primer
gtaaaacgacggccagttgtgataaaccattcctccctg

SEQ ID NO: 126939 - DNA, 21 bp, Artificial Sequence
  primer
cctgaccatgctttgagtctg

SEQ ID NO: 126940 - DNA, 37 bp, Artificial Sequence
  primer
gtaaaacgacggccagtcggagaacggaagtgtcttg

SEQ ID NO: 126941 - DNA, 38 bp, Artificial Sequence
  primer
gtaaaacgacggccagtatggtgtatgtttggtgtggc

SEQ ID NO: 126942 - DNA, 21 bp, Artificial Sequence
  primer
cgctctttcactatggtgctc

SEQ ID NO: 126943 - DNA, 21 bp, Artificial Sequence
  primer
agtgacacatggccacaagag

SEQ ID NO: 126944 - DNA, 38 bp, Artificial Sequence
  primer
gtaaaacgacggccagtcactgatccaccctgctatcc

SEQ ID NO: 126945 - DNA, 38 bp, Artificial Sequence
  primer
gtaaaacgacggccagtcagacaaccaaaggcacaaag

SEQ ID NO: 126946 - DNA, 38 bp, Artificial Sequence
  primer
gtaaaacgacggccagtagccaccatccaaccagatag

SEQ ID NO: 126947 - DNA, 21 bp, Artificial Sequence
  primer
gggaagatcacttgaacccag

SEQ ID NO: 126948 - DNA, 23 bp, Artificial Sequence
  primer
gaaaggatagaatcctctgctcc

SEQ ID NO: 126949 - DNA, 22 bp, Artificial Sequence
  primer
gaaacaattcaagaagccatgc

SEQ ID NO: 126950 - DNA, 23 bp, Artificial Sequence
  primer
cgcacagccgatatattcatttc

SEQ ID NO: 126951 - DNA, 23 bp, Artificial Sequence
  primer
ccgttgttggattaacttcactg

SEQ ID NO: 126952 - DNA, 38 bp, Artificial Sequence
  primer
gtaaaacgacggccagtgcagtgttggaggcaagagac

SEQ ID NO: 126953 - DNA, 21 bp, Artificial Sequence
  primer
ctggtctgcctgtatggaagg

SEQ ID NO: 126954 - DNA, 38 bp, Artificial Sequence
  primer
gtaaaacgacggccagtcaacctttggctgagaggaag

SEQ ID NO: 126955 - DNA, 21 bp, Artificial Sequence
  primer
ttgtttagctgttcctgtccc

SEQ ID NO: 126956 - DNA, 21 bp, Artificial Sequence
  primer
actgttctgtcctgagttggg

SEQ ID NO: 126957 - DNA, 38 bp, Artificial Sequence
  primer
gtaaaacgacggccagttctcccaaatgcctaggtctc

SEQ ID NO: 126958 - DNA, 18 bp, Artificial Sequence
  primer
ggacgatcagcctcaggg

SEQ ID NO: 126959 - DNA, 18 bp, Artificial Sequence
  primer
agaatggcgtgaacccag

SEQ ID NO: 126960 - DNA, 19 bp, Artificial Sequence
  primer
ccatcctgggcaacaagag

SEQ ID NO: 126961 - DNA, 20 bp, Artificial Sequence
  primer
ccagactgtcctttgttggg

SEQ ID NO: 126962 - DNA, 21 bp, Artificial Sequence
  primer
cagacagccaccattcacttg

SEQ ID NO: 126963 - DNA, 20 bp, Artificial Sequence
  primer
caaccaaccaaccaatgagg

SEQ ID NO: 126964 - DNA, 20 bp, Artificial Sequence
  primer
acatgtggcttgcttccatc

SEQ ID NO: 126965 - DNA, 36 bp, Artificial Sequence
  primer
gtaaaacgacggccagtcagtgatcagagcccatgc

SEQ ID NO: 126966 - DNA, 22 bp, Artificial Sequence
  primer
cagtcataccattcctgcaagt

SEQ ID NO: 126967 - DNA, 38 bp, Artificial Sequence
  primer
gtaaaacgacggccagtgacttccaaccctcacagcac

SEQ ID NO: 126968 - DNA, 19 bp, Artificial Sequence
  primer
ggatagccagctgtcaggc

SEQ ID NO: 126969 - DNA, 37 bp, Artificial Sequence
  primer
gtaaaacgacggccagtcacccagcctcagtttcttg

SEQ ID NO: 126970 - DNA, 38 bp, Artificial Sequence
  primer
gtaaaacgacggccagtctgagtctgaggctctctggg

SEQ ID NO: 126971 - DNA, 21 bp, Artificial Sequence
  primer
ctttctcaaatgcagggttgg

SEQ ID NO: 126972 - DNA, 38 bp, Artificial Sequence
  primer
gtaaaacgacggccagtagagccacagcaagaaagacc

SEQ ID NO: 126973 - DNA, 21 bp, Artificial Sequence
  primer
gagttccaccttcgactccac

SEQ ID NO: 126974 - DNA, 36 bp, Artificial Sequence
  primer
gtaaaacgacggccagtctccctctgggctttcctc

SEQ ID NO: 126975 - DNA, 19 bp, Artificial Sequence
  primer
cagcggaagaagggaggag

SEQ ID NO: 126976 - DNA, 38 bp, Artificial Sequence
  primer
gtaaaacgacggccagtgcaccagagaagatgcaacac

SEQ ID NO: 126977 - DNA, 38 bp, Artificial Sequence
  primer
gtaaaacgacggccagtccatattggccagtgtaggtc

SEQ ID NO: 126978 - DNA, 21 bp, Artificial Sequence
  primer
gccaactacaaatcagcatgg

SEQ ID NO: 126979 - DNA, 20 bp, Artificial Sequence
  primer
tgttcaacagagggagaccc

SEQ ID NO: 126980 - DNA, 21 bp, Artificial Sequence
  primer
gcatctacccaagagaggagg

SEQ ID NO: 126981 - DNA, 21 bp, Artificial Sequence
  primer
agaaaccacacactctttggg

SEQ ID NO: 126982 - DNA, 21 bp, Artificial Sequence
  primer
ctggcctcacccttagaagtc

SEQ ID NO: 126983 - DNA, 21 bp, Artificial Sequence
  primer
cttctgagagacccttgcacc

SEQ ID NO: 126984 - DNA, 21 bp, Artificial Sequence
  primer
ctcactgaattcacaggcgtc

SEQ ID NO: 126985 - DNA, 20 bp, Artificial Sequence
  primer
aaggcctcaccttcagaacc

SEQ ID NO: 126986 - DNA, 21 bp, Artificial Sequence
  primer
cttctgaaagacccttgcacc

SEQ ID NO: 126987 - DNA, 21 bp, Artificial Sequence
  primer
gagatcagaagcttgaagggc

SEQ ID NO: 126988 - DNA, 21 bp, Artificial Sequence
  primer
gctcgaaatagttctgtgccc

SEQ ID NO: 126989 - DNA, 38 bp, Artificial Sequence
  primer
gtaaaacgacggccagttaatcagccaaacatcttgcg

SEQ ID NO: 126990 - DNA, 38 bp, Artificial Sequence
  primer
gtaaaacgacggccagtgaatgggatatgggctgaaac

SEQ ID NO: 126991 - DNA, 21 bp, Artificial Sequence
  primer
ctcaaacatgtcgtggcagtc

SEQ ID NO: 126992 - DNA, 36 bp, Artificial Sequence
  primer
gtaaaacgacggccagtggcgtggaaatctctttgg

SEQ ID NO: 126993 - DNA, 21 bp, Artificial Sequence
  primer
agggttccttgtggtcagttg

SEQ ID NO: 126994 - DNA, 38 bp, Artificial Sequence
  primer
gtaaaacgacggccagttgggtccttcgagagttcttc

SEQ ID NO: 126995 - DNA, 38 bp, Artificial Sequence
  primer
gtaaaacgacggccagtgtactagggccacaaactcgg

SEQ ID NO: 126996 - DNA, 37 bp, Artificial Sequence
  primer
gtaaaacgacggccagtgccgagaggttgaagaggtc

SEQ ID NO: 126997 - DNA, 17 bp, Artificial Sequence
  primer
agcagtgagccgccctc

SEQ ID NO: 126998 - DNA, 38 bp, Artificial Sequence
  primer
gtaaaacgacggccagtgttgctttcgctgtactgcac

SEQ ID NO: 126999 - DNA, 35 bp, Artificial Sequence
  primer
gtaaaacgacggccagtaaactccacatcctgccg

SEQ ID NO: 127000 - DNA, 21 bp, Artificial Sequence
  primer
gctcacacagagcttctccac

SEQ ID NO: 127001 - DNA, 40 bp, Artificial Sequence
  primer
gtaaaacgacggccagtagcacaatcatttctttcctgag

SEQ ID NO: 127002 - DNA, 44 bp, Artificial Sequence
  primer
gtaaaacgacggccagtgaatattctttcaattcttaaagcagg

SEQ ID NO: 127003 - DNA, 21 bp, Artificial Sequence
  primer
cggtatcaatgaaatttgggc

SEQ ID NO: 127004 - DNA, 20 bp, Artificial Sequence
  primer
aggattgtgccactgcattc

SEQ ID NO: 127005 - DNA, 21 bp, Artificial Sequence
  primer
tctgttgctgttcatccaacc

SEQ ID NO: 127006 - DNA, 38 bp, Artificial Sequence
  primer
gtaaaacgacggccagttagggcaagactcctgattcc

SEQ ID NO: 127007 - DNA, 44 bp, Artificial Sequence
  primer
gtaaaacgacggccagtcatgtgcatacctttgaactaaataag

SEQ ID NO: 127008 - DNA, 26 bp, Artificial Sequence
  primer
ttgggaacatgattaagagatagacc

SEQ ID NO: 127009 - DNA, 21 bp, Artificial Sequence
  primer
tccaaatagtcctgtggttcc

SEQ ID NO: 127010 - DNA, 37 bp, Artificial Sequence
  primer
gtaaaacgacggccagtagctgtgattgtgccactgc

SEQ ID NO: 127011 - DNA, 21 bp, Artificial Sequence
  primer
tgcctccacaccaaataagtc

SEQ ID NO: 127012 - DNA, 37 bp, Artificial Sequence
  primer
gtaaaacgacggccagtggttgggaggtgatggagac

SEQ ID NO: 127013 - DNA, 21 bp, Artificial Sequence
  primer
aaattggaaatgcacctctgc

SEQ ID NO: 127014 - DNA, 37 bp, Artificial Sequence
  primer
gtaaaacgacggccagtactgttgggtgtgggttgtc

SEQ ID NO: 127015 - DNA, 38 bp, Artificial Sequence
  primer
gtaaaacgacggccagttcagtcccagaagtgagcttg

SEQ ID NO: 127016 - DNA, 38 bp, Artificial Sequence
  primer
gtaaaacgacggccagtgatgtcacgcacaatttcctg

SEQ ID NO: 127017 - DNA, 38 bp, Artificial Sequence
  primer
gtaaaacgacggccagtacaaataaagccacgccaatc

SEQ ID NO: 127018 - DNA, 37 bp, Artificial Sequence
  primer
gtaaaacgacggccagtacccaacctggccagtaaac

SEQ ID NO: 127019 - DNA, 21 bp, Artificial Sequence
  primer
aggataaacccaagtcccacc

SEQ ID NO: 127020 - DNA, 20 bp, Artificial Sequence
  primer
agtgtgcagctcatcccaac

SEQ ID NO: 127021 - DNA, 37 bp, Artificial Sequence
  primer
gtaaaacgacggccagtagggagagctgctcagttgg

SEQ ID NO: 127022 - DNA, 38 bp, Artificial Sequence
  primer
gtaaaacgacggccagttgcgagactgaagactgcttg

SEQ ID NO: 127023 - DNA, 21 bp, Artificial Sequence
  primer
gacaagacaccacttcatggg

SEQ ID NO: 127024 - DNA, 20 bp, Artificial Sequence
  primer
cccagaggaaccaggaagac

SEQ ID NO: 127025 - DNA, 38 bp, Artificial Sequence
  primer
gtaaaacgacggccagtagcctggtgcctctaattgtc

SEQ ID NO: 127026 - DNA, 20 bp, Artificial Sequence
  primer
agctcacactgggtctggag

SEQ ID NO: 127027 - DNA, 38 bp, Artificial Sequence
  primer
gtaaaacgacggccagtttctccgtggtctgagaaacc

SEQ ID NO: 127028 - DNA, 38 bp, Artificial Sequence
  primer
gtaaaacgacggccagtcccacttggaatgacaaggac

SEQ ID NO: 127029 - DNA, 40 bp, Artificial Sequence
  primer
gtaaaacgacggccagtccttgagtaaacatggcactttg

SEQ ID NO: 127030 - DNA, 38 bp, Artificial Sequence
  primer
gtaaaacgacggccagtaaagctgtgtggtaagcaggg

SEQ ID NO: 127031 - DNA, 36 bp, Artificial Sequence
  primer
gtaaaacgacggccagtgtcttgctgtctcccaggc

SEQ ID NO: 127032 - DNA, 21 bp, Artificial Sequence
  primer
tctctacagacagcccacctg

SEQ ID NO: 127033 - DNA, 37 bp, Artificial Sequence
  primer
gtaaaacgacggccagtgctctcaggtcctcctgtcc

SEQ ID NO: 127034 - DNA, 37 bp, Artificial Sequence
  primer
gtaaaacgacggccagtcctgagagaggaccagtgcc

SEQ ID NO: 127035 - DNA, 20 bp, Artificial Sequence
  primer
aggcctcaacctcagcacag

SEQ ID NO: 127036 - DNA, 21 bp, Artificial Sequence
  primer
cacggctaaggactgttctcc

SEQ ID NO: 127037 - DNA, 37 bp, Artificial Sequence
  primer
gtaaaacgacggccagtcgttctgggctgattcagag

SEQ ID NO: 127038 - DNA, 21 bp, Artificial Sequence
  primer
gaggctgtcagtcacttcctg

SEQ ID NO: 127039 - DNA, 36 bp, Artificial Sequence
  primer
gtaaaacgacggccagtcagtggagaccgtgtggtg

SEQ ID NO: 127040 - DNA, 21 bp, Artificial Sequence
  primer
gagatctggttccactttggg

SEQ ID NO: 127041 - DNA, 22 bp, Artificial Sequence
  primer
cagagccgcttcaatcttattc

SEQ ID NO: 127042 - DNA, 36 bp, Artificial Sequence
  primer
gtaaaacgacggccagttcttctctcggctcctccc

SEQ ID NO: 127043 - DNA, 20 bp, Artificial Sequence
  primer
gacacagctccttccagcag

SEQ ID NO: 127044 - DNA, 43 bp, Artificial Sequence
  primer
gtaaaacgacggccagtgagaaatagttcacaaagagctcaaa

SEQ ID NO: 127045 - DNA, 40 bp, Artificial Sequence
  primer
gtaaaacgacggccagttgctgctttaacagactttctgg

SEQ ID NO: 127046 - DNA, 38 bp, Artificial Sequence
  primer
gtaaaacgacggccagtgcccactagtctccaatccac

SEQ ID NO: 127047 - DNA, 21 bp, Artificial Sequence
  primer
gccttgtcctcccttaattcc

SEQ ID NO: 127048 - DNA, 21 bp, Artificial Sequence
  primer
agactggctacctccagaccc

SEQ ID NO: 127049 - DNA, 21 bp, Artificial Sequence
  primer
cacaagtttgacctgagccac

SEQ ID NO: 127050 - DNA, 21 bp, Artificial Sequence
  primer
cagccagatgattgactggag

SEQ ID NO: 127051 - DNA, 21 bp, Artificial Sequence
  primer
tggcatcactgtggctaaatc

SEQ ID NO: 127052 - DNA, 20 bp, Artificial Sequence
  primer
agatccagcttggctgtgag

SEQ ID NO: 127053 - DNA, 21 bp, Artificial Sequence
  primer
ttggccatgagtttgttcttg

SEQ ID NO: 127054 - DNA, 21 bp, Artificial Sequence
  primer
gtgtgtcctgaatgtgtgtgc

SEQ ID NO: 127055 - DNA, 37 bp, Artificial Sequence
  primer
gtaaaacgacggccagtagtgtggtctgtgtgagccc

SEQ ID NO: 127056 - DNA, 38 bp, Artificial Sequence
  primer
gtaaaacgacggccagtcatgaccagagtgggaatgtc

SEQ ID NO: 127057 - DNA, 25 bp, Artificial Sequence
  primer
tctcaggaactatggattctgactg

SEQ ID NO: 127058 - DNA, 19 bp, Artificial Sequence
  primer
cttggccatgagtgtgtcc

SEQ ID NO: 127059 - DNA, 21 bp, Artificial Sequence
  primer
gaccttcttccagtggtcctg

SEQ ID NO: 127060 - DNA, 23 bp, Artificial Sequence
  primer
tgagaatgtccactggtatctcc

SEQ ID NO: 127061 - DNA, 21 bp, Artificial Sequence
  primer
tgactgtccatgtcgagatcc

SEQ ID NO: 127062 - DNA, 38 bp, Artificial Sequence
  primer
gtaaaacgacggccagttgtttgcagtgctgtctgttg

SEQ ID NO: 127063 - DNA, 43 bp, Artificial Sequence
  primer
gtaaaacgacggccagttgttcatgatttaaactgtgtcttcc

SEQ ID NO: 127064 - DNA, 36 bp, Artificial Sequence
  primer
gtaaaacgacggccagtgagagaggccacgtcttcc

SEQ ID NO: 127065 - DNA, 21 bp, Artificial Sequence
  primer
accttaagtgccagaagccac

SEQ ID NO: 127066 - DNA, 21 bp, Artificial Sequence
  primer
aaggtttagatgctccctgcc

SEQ ID NO: 127067 - DNA, 21 bp, Artificial Sequence
  primer
agcactgacttcctctccctg

SEQ ID NO: 127068 - DNA, 20 bp, Artificial Sequence
  primer
aactggtagcacaagtggcg

SEQ ID NO: 127069 - DNA, 21 bp, Artificial Sequence
  primer
aagcagggaaacaaatgcttg

SEQ ID NO: 127070 - DNA, 21 bp, Artificial Sequence
  primer
cgggcctcagtttctttattg

SEQ ID NO: 127071 - DNA, 39 bp, Artificial Sequence
  primer
gtaaaacgacggccagtgaaagacgtgcatgttactccc

SEQ ID NO: 127072 - DNA, 21 bp, Artificial Sequence
  primer
gaggaagtgacaggcatggag

SEQ ID NO: 127073 - DNA, 38 bp, Artificial Sequence
  primer
gtaaaacgacggccagttcctgttgagtccaaagcatc

SEQ ID NO: 127074 - DNA, 38 bp, Artificial Sequence
  primer
gtaaaacgacggccagtcatccagcctagaccgagaac

SEQ ID NO: 127075 - DNA, 22 bp, Artificial Sequence
  primer
tctggagaagttgtctgccttc

SEQ ID NO: 127076 - DNA, 22 bp, Artificial Sequence
  primer
tgggttactttacacagggcac

SEQ ID NO: 127077 - DNA, 21 bp, Artificial Sequence
  primer
ggaagagtgcctgtgttaggg

SEQ ID NO: 127078 - DNA, 21 bp, Artificial Sequence
  primer
gttgatgaagagctggttggg

SEQ ID NO: 127079 - DNA, 38 bp, Artificial Sequence
  primer
gtaaaacgacggccagtgcctaagggagaagggttagg

SEQ ID NO: 127080 - DNA, 21 bp, Artificial Sequence
  primer
tctgggtattggtccgaagag

SEQ ID NO: 127081 - DNA, 20 bp, Artificial Sequence
  primer
agcttgcaaatggctgactg

SEQ ID NO: 127082 - DNA, 21 bp, Artificial Sequence
  primer
tgtctgacttgcacagaccac

SEQ ID NO: 127083 - DNA, 20 bp, Artificial Sequence
  primer
gaactgggttctcctcccac

SEQ ID NO: 127084 - DNA, 20 bp, Artificial Sequence
  primer
ccagaaagctgtatgccacc

SEQ ID NO: 127085 - DNA, 21 bp, Artificial Sequence
  primer
ttgcacagctgttctttctgc

SEQ ID NO: 127086 - DNA, 38 bp, Artificial Sequence
  primer
gtaaaacgacggccagtactctgaacagcacaggcttc

SEQ ID NO: 127087 - DNA, 20 bp, Artificial Sequence
  primer
cacctgttctgcctacctgc

SEQ ID NO: 127088 - DNA, 37 bp, Artificial Sequence
  primer
gtaaaacgacggccagtctcagtgtaggcaccaaggg

SEQ ID NO: 127089 - DNA, 36 bp, Artificial Sequence
  primer
gtaaaacgacggccagtctaagaggcccacacctgc

SEQ ID NO: 127090 - DNA, 38 bp, Artificial Sequence
  primer
gtaaaacgacggccagtagcaggatgcaaagtcatcag

SEQ ID NO: 127091 - DNA, 21 bp, Artificial Sequence
  primer
atcggtgtgtagtccattccc

SEQ ID NO: 127092 - DNA, 37 bp, Artificial Sequence
  primer
gtaaaacgacggccagtaacacgtcggaccaacagtc

SEQ ID NO: 127093 - DNA, 21 bp, Artificial Sequence
  primer
cggacacggaggtaggaatag

SEQ ID NO: 127094 - DNA, 21 bp, Artificial Sequence
  primer
ccgtctaggtcttcgttccac

SEQ ID NO: 127095 - DNA, 21 bp, Artificial Sequence
  primer
ctcctcctcgtactccacagg

SEQ ID NO: 127096 - DNA, 21 bp, Artificial Sequence
  primer
ctaaccttcgctgggtctgag

SEQ ID NO: 127097 - DNA, 20 bp, Artificial Sequence
  primer
gtcggtgttgatctggatgc

SEQ ID NO: 127098 - DNA, 21 bp, Artificial Sequence
  primer
atacacgatgccctggttgtc

SEQ ID NO: 127099 - DNA, 21 bp, Artificial Sequence
  primer
tcaccttcgttgataacctgc

SEQ ID NO: 127100 - DNA, 38 bp, Artificial Sequence
  primer
gtaaaacgacggccagtactgcaaagtagcccttctcg

SEQ ID NO: 127101 - DNA, 20 bp, Artificial Sequence
  primer
gagatacggttgcatgggtg

SEQ ID NO: 127102 - DNA, 20 bp, Artificial Sequence
  primer
ctgtgccagcctgtcttagg

SEQ ID NO: 127103 - DNA, 38 bp, Artificial Sequence
  primer
gtaaaacgacggccagtattggtgctgcttgaggctac

SEQ ID NO: 127104 - DNA, 38 bp, Artificial Sequence
  primer
gtaaaacgacggccagtcaggctcctgagaggatgaag

SEQ ID NO: 127105 - DNA, 21 bp, Artificial Sequence
  primer
agcttcgaggtgtcaagatgg

SEQ ID NO: 127106 - DNA, 21 bp, Artificial Sequence
  primer
aatccctaccaccagaccctc

SEQ ID NO: 127107 - DNA, 21 bp, Artificial Sequence
  primer
actaggcagcctccatagctc

SEQ ID NO: 127108 - DNA, 20 bp, Artificial Sequence
  primer
gaaggtgggtgtgagggttc

SEQ ID NO: 127109 - DNA, 20 bp, Artificial Sequence
  primer
agggtgtaggccttgagcac

SEQ ID NO: 127110 - DNA, 21 bp, Artificial Sequence
  primer
aggtttctgaggccacagttc

SEQ ID NO: 127111 - DNA, 20 bp, Artificial Sequence
  primer
aggctcaacctccctcagtc

SEQ ID NO: 127112 - DNA, 21 bp, Artificial Sequence
  primer
acccagtcctgtgatttgagg

SEQ ID NO: 127113 - DNA, 19 bp, Artificial Sequence
  primer
ctttggcttcctgctctgg

SEQ ID NO: 127114 - DNA, 21 bp, Artificial Sequence
  primer
gtaaagtgcggtgcctatttg

SEQ ID NO: 127115 - DNA, 22 bp, Artificial Sequence
  primer
tctccaacgttctagcttcgac

SEQ ID NO: 127116 - DNA, 39 bp, Artificial Sequence
  primer
gtaaaacgacggccagttcaacagtaaccagaccatccc

SEQ ID NO: 127117 - DNA, 20 bp, Artificial Sequence
  primer
tttctgagtcactggcctgg

SEQ ID NO: 127118 - DNA, 38 bp, Artificial Sequence
  primer
gtaaaacgacggccagtcgctactttctcctcctcacc

SEQ ID NO: 127119 - DNA, 21 bp, Artificial Sequence
  primer
aaagccattgataaacagccc

SEQ ID NO: 127120 - DNA, 44 bp, Artificial Sequence
  primer
gtaaaacgacggccagttgctaatagaactccaaggaaacttac

SEQ ID NO: 127121 - DNA, 22 bp, Artificial Sequence
  primer
aagacatgcaattaggcaggac

SEQ ID NO: 127122 - DNA, 21 bp, Artificial Sequence
  primer
tgtgaatcttgccctttagca

SEQ ID NO: 127123 - DNA, 22 bp, Artificial Sequence
  primer
tcactgacaacaccgtaaatgg

SEQ ID NO: 127124 - DNA, 27 bp, Artificial Sequence
  primer
gcaaagcatcttaattgtagtttaagg

SEQ ID NO: 127125 - DNA, 38 bp, Artificial Sequence
  primer
gtaaaacgacggccagtatttgttctgtttgcaccagg

SEQ ID NO: 127126 - DNA, 22 bp, Artificial Sequence
  primer
ggcaggctgtagcagagataac

SEQ ID NO: 127127 - DNA, 21 bp, Artificial Sequence
  primer
ccacacccagcctcttacttg

SEQ ID NO: 127128 - DNA, 38 bp, Artificial Sequence
  primer
gtaaaacgacggccagtcctatcatcttgcaggcttcc

SEQ ID NO: 127129 - DNA, 38 bp, Artificial Sequence
  primer
gtaaaacgacggccagtgaaagtcacctcccacaaatg

SEQ ID NO: 127130 - DNA, 21 bp, Artificial Sequence
  primer
ggtttggctagataagcgacc

SEQ ID NO: 127131 - DNA, 22 bp, Artificial Sequence
  primer
acgctgaaccatttacagacac

SEQ ID NO: 127132 - DNA, 38 bp, Artificial Sequence
  primer
gtaaaacgacggccagtcagagtggcaagaggcttagg

SEQ ID NO: 127133 - DNA, 37 bp, Artificial Sequence
  primer
gtaaaacgacggccagtcaggcacctgtagttccagc

SEQ ID NO: 127134 - DNA, 44 bp, Artificial Sequence
  primer
gtaaaacgacggccagtatttatttgtactggacagcactacac

SEQ ID NO: 127135 - DNA, 23 bp, Artificial Sequence
  primer
gcagtattcttggtcacatttgg

SEQ ID NO: 127136 - DNA, 21 bp, Artificial Sequence
  primer
cccacatgctgcaagttacac

SEQ ID NO: 127137 - DNA, 21 bp, Artificial Sequence
  primer
tttgaaaccacaaagattggc

SEQ ID NO: 127138 - DNA, 37 bp, Artificial Sequence
  primer
gtaaaacgacggccagtgagcaccagcaacaaccaag

SEQ ID NO: 127139 - DNA, 38 bp, Artificial Sequence
  primer
gtaaaacgacggccagtaactgcccaaactgtcagagc

SEQ ID NO: 127140 - DNA, 22 bp, Artificial Sequence
  primer
gctgtccctctgaccataacag

SEQ ID NO: 127141 - DNA, 22 bp, Artificial Sequence
  primer
aatccatttgcgatggtacaac

SEQ ID NO: 127142 - DNA, 38 bp, Artificial Sequence
  primer
gtaaaacgacggccagtagcagaatgcaccaatgtgtc

SEQ ID NO: 127143 - DNA, 21 bp, Artificial Sequence
  primer
ggaacctgccgaactttacac

SEQ ID NO: 127144 - DNA, 21 bp, Artificial Sequence
  primer
tgagggacaagcagaaacaga

SEQ ID NO: 127145 - DNA, 21 bp, Artificial Sequence
  primer
ccatttcccaggacctaagac

SEQ ID NO: 127146 - DNA, 20 bp, Artificial Sequence
  primer
ttcctgcctatggcactgac

SEQ ID NO: 127147 - DNA, 38 bp, Artificial Sequence
  primer
gtaaaacgacggccagtagttatcctcccacctcagcc

SEQ ID NO: 127148 - DNA, 37 bp, Artificial Sequence
  primer
gtaaaacgacggccagtctgtgcccagccagacttag

SEQ ID NO: 127149 - DNA, 43 bp, Artificial Sequence
  primer
gtaaaacgacggccagtaatccctattcctaatgtagcaaatc

SEQ ID NO: 127150 - DNA, 21 bp, Artificial Sequence
  primer
cacacacagcatggtgaactg

SEQ ID NO: 127151 - DNA, 20 bp, Artificial Sequence
  primer
gggacaagtcagtcagccag

SEQ ID NO: 127152 - DNA, 19 bp, Artificial Sequence
  primer
catgcactccagaccgacc

SEQ ID NO: 127153 - DNA, 38 bp, Artificial Sequence
  primer
gtaaaacgacggccagttcctcctgccaaggttctaag

SEQ ID NO: 127154 - DNA, 21 bp, Artificial Sequence
  primer
ggctccacattcaagttaccc

SEQ ID NO: 127155 - DNA, 21 bp, Artificial Sequence
  primer
ggccaaagataggtgcagaac

SEQ ID NO: 127156 - DNA, 38 bp, Artificial Sequence
  primer
gtaaaacgacggccagtatctagcgcagagcctgacac

SEQ ID NO: 127157 - DNA, 21 bp, Artificial Sequence
  primer
attcacaaagcactgacccag

SEQ ID NO: 127158 - DNA, 21 bp, Artificial Sequence
  primer
agttacattgccagcttccag

SEQ ID NO: 127159 - DNA, 21 bp, Artificial Sequence
  primer
ggaggccttagagccaaagag

SEQ ID NO: 127160 - DNA, 38 bp, Artificial Sequence
  primer
gtaaaacgacggccagtggcccatggcactaataagac

SEQ ID NO: 127161 - DNA, 39 bp, Artificial Sequence
  primer
gtaaaacgacggccagtaatactgtgcaactgccatgtg

SEQ ID NO: 127162 - DNA, 22 bp, Artificial Sequence
  primer
aataaagcaaaggctgacatgc

SEQ ID NO: 127163 - DNA, 21 bp, Artificial Sequence
  primer
tgtcccactttctgtacctgg

SEQ ID NO: 127164 - DNA, 21 bp, Artificial Sequence
  primer
tttagctccagggatgctttc

SEQ ID NO: 127165 - DNA, 38 bp, Artificial Sequence
  primer
gtaaaacgacggccagtctccagacctagtttccctgc

SEQ ID NO: 127166 - DNA, 38 bp, Artificial Sequence
  primer
gtaaaacgacggccagtacatgagatgggaaggtcctg

SEQ ID NO: 127167 - DNA, 38 bp, Artificial Sequence
  primer
gtaaaacgacggccagttgaatctcgtctgtccagtgc

SEQ ID NO: 127168 - DNA, 20 bp, Artificial Sequence
  primer
agcaggaccacacacctgtc

SEQ ID NO: 127169 - DNA, 19 bp, Artificial Sequence
  primer
caggctcctggttcaatgc

SEQ ID NO: 127170 - DNA, 39 bp, Artificial Sequence
  primer
gtaaaacgacggccagtgagattaccaggcacctgtcac

SEQ ID NO: 127171 - DNA, 21 bp, Artificial Sequence
  primer
cccactctgtgcatttacgtg

SEQ ID NO: 127172 - DNA, 21 bp, Artificial Sequence
  primer
atgaaggccaaagggaataag

SEQ ID NO: 127173 - DNA, 20 bp, Artificial Sequence
  primer
aggagaaacgcacagggttc

SEQ ID NO: 127174 - DNA, 22 bp, Artificial Sequence
  primer
ttgccacagaacatgaaatagg

SEQ ID NO: 127175 - DNA, 21 bp, Artificial Sequence
  primer
gtgagatcagacaatggcagg

SEQ ID NO: 127176 - DNA, 38 bp, Artificial Sequence
  primer
gtaaaacgacggccagtcgtacggagaaacaactggag

SEQ ID NO: 127177 - DNA, 19 bp, Artificial Sequence
  primer
ccttcaccctttccagcac

SEQ ID NO: 127178 - DNA, 38 bp, Artificial Sequence
  primer
gtaaaacgacggccagtgtgacgcacaagggaggtatg

SEQ ID NO: 127179 - DNA, 38 bp, Artificial Sequence
  primer
gtaaaacgacggccagtcaggcagagcttctgatttcc

SEQ ID NO: 127180 - DNA, 39 bp, Artificial Sequence
  primer
gtaaaacgacggccagtttaccagaaggcaatgctgttt

SEQ ID NO: 127181 - DNA, 21 bp, Artificial Sequence
  primer
aggctgctacagccctagttc

SEQ ID NO: 127182 - DNA, 22 bp, Artificial Sequence
  primer
tgactgtggaatcattgtttgg

SEQ ID NO: 127183 - DNA, 18 bp, Artificial Sequence
  primer
gcaagccacagggtgttg

SEQ ID NO: 127184 - DNA, 38 bp, Artificial Sequence
  primer
gtaaaacgacggccagtgacacgcgcaagactacaatc

SEQ ID NO: 127185 - DNA, 38 bp, Artificial Sequence
  primer
gtaaaacgacggccagtaatttacagctgaagcagccc

SEQ ID NO: 127186 - DNA, 21 bp, Artificial Sequence
  primer
cttacccagggaagtcagcag

SEQ ID NO: 127187 - DNA, 38 bp, Artificial Sequence
  primer
gtaaaacgacggccagtggtgccacccacaataaatag

SEQ ID NO: 127188 - DNA, 21 bp, Artificial Sequence
  primer
ggaataacccaacatcgcaag

SEQ ID NO: 127189 - DNA, 20 bp, Artificial Sequence
  primer
actgagcaggaggcagaacc

SEQ ID NO: 127190 - DNA, 38 bp, Artificial Sequence
  primer
gtaaaacgacggccagtcctttaccactccctgtctcc

SEQ ID NO: 127191 - DNA, 21 bp, Artificial Sequence
  primer
ctgctttacacctggaggagg

SEQ ID NO: 127192 - DNA, 21 bp, Artificial Sequence
  primer
aagcaactcaattctggcagg

SEQ ID NO: 127193 - DNA, 39 bp, Artificial Sequence
  primer
gtaaaacgacggccagtcaggtgatttcagagaaggaaa

SEQ ID NO: 127194 - DNA, 21 bp, Artificial Sequence
  primer
ttccgctagaagctatgaggc

SEQ ID NO: 127195 - DNA, 38 bp, Artificial Sequence
  primer
gtaaaacgacggccagttaaagacagggccattcaagc

SEQ ID NO: 127196 - DNA, 21 bp, Artificial Sequence
  primer
cggagacaggagggatatttg

SEQ ID NO: 127197 - DNA, 19 bp, Artificial Sequence
  primer
ctgcatgatctgctgctcc

SEQ ID NO: 127198 - DNA, 19 bp, Artificial Sequence
  primer
ggaagggaagactcggcag

SEQ ID NO: 127199 - DNA, 20 bp, Artificial Sequence
  primer
cccgaaattcatcatctggg

SEQ ID NO: 127200 - DNA, 35 bp, Artificial Sequence
  primer
gtaaaacgacggccagtggacttggacgagccctg

SEQ ID NO: 127201 - DNA, 35 bp, Artificial Sequence
  primer
gtaaaacgacggccagttcgggtctgacttgtcgc

SEQ ID NO: 127202 - DNA, 21 bp, Artificial Sequence
  primer
tacgagagagttcaagctggg

SEQ ID NO: 127203 - DNA, 38 bp, Artificial Sequence
  primer
gtaaaacgacggccagtttcatttcctttcccgttcac

SEQ ID NO: 127204 - DNA, 21 bp, Artificial Sequence
  primer
atcagggaaataaagggcacc

SEQ ID NO: 127205 - DNA, 27 bp, Artificial Sequence
  primer
tttaaaggtttcataggttctaacagc

SEQ ID NO: 127206 - DNA, 39 bp, Artificial Sequence
  primer
gtaaaacgacggccagtggcatatcatccagttctgacc

SEQ ID NO: 127207 - DNA, 21 bp, Artificial Sequence
  primer
taccgtcagcaatgtgaatcc

SEQ ID NO: 127208 - DNA, 38 bp, Artificial Sequence
  primer
gtaaaacgacggccagtcagactgcttgaattgccaac

SEQ ID NO: 127209 - DNA, 23 bp, Artificial Sequence
  primer
cataagcaacgtatttcacaggc

SEQ ID NO: 127210 - DNA, 38 bp, Artificial Sequence
  primer
gtaaaacgacggccagtcaccatgcgagatatagggaa

SEQ ID NO: 127211 - DNA, 45 bp, Artificial Sequence
  primer
gtaaaacgacggccagtggcttacattattaagagtcaatacacg

SEQ ID NO: 127212 - DNA, 21 bp, Artificial Sequence
  primer
gagggaaccaatgctgttgac

SEQ ID NO: 127213 - DNA, 25 bp, Artificial Sequence
  primer
ggatgataccaaattgatcagtaca

SEQ ID NO: 127214 - DNA, 38 bp, Artificial Sequence
  primer
gtaaaacgacggccagtcttcccttgggcttaatgttt

SEQ ID NO: 127215 - DNA, 27 bp, Artificial Sequence
  primer
ttaatgctagcctagagtagaaacagc

SEQ ID NO: 127216 - DNA, 44 bp, Artificial Sequence
  primer
gtaaaacgacggccagttttagagctcatgtaatattcttgctg

SEQ ID NO: 127217 - DNA, 20 bp, Artificial Sequence
  primer
caccacggaaaggtgtgaac

SEQ ID NO: 127218 - DNA, 21 bp, Artificial Sequence
  primer
tggctcatgtggctttgttag

SEQ ID NO: 127219 - DNA, 21 bp, Artificial Sequence
  primer
aagagacgagagctgccattc

SEQ ID NO: 127220 - DNA, 24 bp, Artificial Sequence
  primer
ttcagaagagtactacacccatgc

SEQ ID NO: 127221 - DNA, 38 bp, Artificial Sequence
  primer
gtaaaacgacggccagttagccaaagttccttcctgtg

SEQ ID NO: 127222 - DNA, 24 bp, Artificial Sequence
  primer
tcctgtgttgcaaatacatcattc

SEQ ID NO: 127223 - DNA, 18 bp, Artificial Sequence
  primer
cctgtcaccacacctggc

SEQ ID NO: 127224 - DNA, 38 bp, Artificial Sequence
  primer
gtaaaacgacggccagtccataatgtttgctgtcctcg

SEQ ID NO: 127225 - DNA, 22 bp, Artificial Sequence
  primer
tgggctgtgagtcctttcttag

SEQ ID NO: 127226 - DNA, 21 bp, Artificial Sequence
  primer
acctcttgctcacaccaacac

SEQ ID NO: 127227 - DNA, 38 bp, Artificial Sequence
  primer
gtaaaacgacggccagtatagatgccatcattgccttg

SEQ ID NO: 127228 - DNA, 37 bp, Artificial Sequence
  primer
gtaaaacgacggccagtgtagagcaatggagccatcc

SEQ ID NO: 127229 - DNA, 21 bp, Artificial Sequence
  primer
gaccctcacagatccttcctg

SEQ ID NO: 127230 - DNA, 21 bp, Artificial Sequence
  primer
ctgcaagagacatcaaggctg

SEQ ID NO: 127231 - DNA, 21 bp, Artificial Sequence
  primer
ctgtgtgactgcagaacctgg

SEQ ID NO: 127232 - DNA, 35 bp, Artificial Sequence
  primer
gtaaaacgacggccagtgagctccttcaggcggac

SEQ ID NO: 127233 - DNA, 21 bp, Artificial Sequence
  primer
gagaactgcctaacattgccc

SEQ ID NO: 127234 - DNA, 38 bp, Artificial Sequence
  primer
gtaaaacgacggccagtggaactcacgctctctcctgt

SEQ ID NO: 127235 - DNA, 38 bp, Artificial Sequence
  primer
gtaaaacgacggccagttcggaagagtatggaagaggg

SEQ ID NO: 127236 - DNA, 38 bp, Artificial Sequence
  primer
gtaaaacgacggccagtctgtggctggtagctgtctcc

SEQ ID NO: 127237 - DNA, 21 bp, Artificial Sequence
  primer
atttcagccttgatcactccc

SEQ ID NO: 127238 - DNA, 19 bp, Artificial Sequence
  primer
gcctctttgccagcaattc

SEQ ID NO: 127239 - DNA, 39 bp, Artificial Sequence
  primer
gtaaaacgacggccagtcatacagaagtgatgcacaggc

SEQ ID NO: 127240 - DNA, 38 bp, Artificial Sequence
  primer
gtaaaacgacggccagtaactggatccattccttcctg

SEQ ID NO: 127241 - DNA, 38 bp, Artificial Sequence
  primer
gtaaaacgacggccagtccagggatggtctctatctcc

SEQ ID NO: 127242 - DNA, 23 bp, Artificial Sequence
  primer
aaacgagtttgtattgcaccaag

SEQ ID NO: 127243 - DNA, 40 bp, Artificial Sequence
  primer
gtaaaacgacggccagtccagcttctgctttaaggttagg

SEQ ID NO: 127244 - DNA, 20 bp, Artificial Sequence
  primer
tttccatcaggtgagccttc

SEQ ID NO: 127245 - DNA, 36 bp, Artificial Sequence
  primer
gtaaaacgacggccagttttcccagttcaagcatgg

SEQ ID NO: 127246 - DNA, 21 bp, Artificial Sequence
  primer
tctgccctttcagatcagtcc

SEQ ID NO: 127247 - DNA, 21 bp, Artificial Sequence
  primer
tcatccttgagacttagcgcc

SEQ ID NO: 127248 - DNA, 38 bp, Artificial Sequence
  primer
gtaaaacgacggccagtatggtagaaaggttgggagcc

SEQ ID NO: 127249 - DNA, 41 bp, Artificial Sequence
  primer
gtaaaacgacggccagtaattatcctgtccttgcttactgg

SEQ ID NO: 127250 - DNA, 20 bp, Artificial Sequence
  primer
aagagaacatccacccaccc

SEQ ID NO: 127251 - DNA, 21 bp, Artificial Sequence
  primer
cacagctggtctggctctatg

SEQ ID NO: 127252 - DNA, 21 bp, Artificial Sequence
  primer
tcttaccttcctcctcctccc

SEQ ID NO: 127253 - DNA, 21 bp, Artificial Sequence
  primer
ctgatgggcaccaagtctctc

SEQ ID NO: 127254 - DNA, 21 bp, Artificial Sequence
  primer
ggcttggacctccagacctac

SEQ ID NO: 127255 - DNA, 38 bp, Artificial Sequence
  primer
gtaaaacgacggccagtgggacaaggagacaaatctgc

SEQ ID NO: 127256 - DNA, 21 bp, Artificial Sequence
  primer
cttgaccctctatccaccctg

SEQ ID NO: 127257 - DNA, 22 bp, Artificial Sequence
  primer
cacaagcagaaagctgtcaaag

SEQ ID NO: 127258 - DNA, 23 bp, Artificial Sequence
  primer
ggcattacataccacatttcacc

SEQ ID NO: 127259 - DNA, 41 bp, Artificial Sequence
  primer
gtaaaacgacggccagtgaaacaagtacattccatgtgcag

SEQ ID NO: 127260 - DNA, 21 bp, Artificial Sequence
  primer
atgagctggtctgggtctagg

SEQ ID NO: 127261 - DNA, 39 bp, Artificial Sequence
  primer
gtaaaacgacggccagtacaacagcttaagcagccaaac

SEQ ID NO: 127262 - DNA, 21 bp, Artificial Sequence
  primer
actcagaatcacatccatgcc

SEQ ID NO: 127263 - DNA, 21 bp, Artificial Sequence
  primer
tcctagcttgagcttggctct

SEQ ID NO: 127264 - DNA, 38 bp, Artificial Sequence
  primer
gtaaaacgacggccagtagcacagttctgcatgattgg

SEQ ID NO: 127265 - DNA, 38 bp, Artificial Sequence
  primer
gtaaaacgacggccagtgagaccactgaaatggttggg

SEQ ID NO: 127266 - DNA, 21 bp, Artificial Sequence
  primer
gttgcccaactactcattcgc

SEQ ID NO: 127267 - DNA, 20 bp, Artificial Sequence
  primer
ttgtcccatgcttccaagac

SEQ ID NO: 127268 - DNA, 22 bp, Artificial Sequence
  primer
caaagtttaatgaggccacagc

SEQ ID NO: 127269 - DNA, 38 bp, Artificial Sequence
  primer
gtaaaacgacggccagttcccttctggtgcactgttac

SEQ ID NO: 127270 - DNA, 22 bp, Artificial Sequence
  primer
tcattcctatggatgcaaacac

SEQ ID NO: 127271 - DNA, 43 bp, Artificial Sequence
  primer
gtaaaacgacggccagtccaaagaatcaacttagactcattcc

SEQ ID NO: 127272 - DNA, 42 bp, Artificial Sequence
  primer
gtaaaacgacggccagttgaaattatcttggctagcaaactg

SEQ ID NO: 127273 - DNA, 24 bp, Artificial Sequence
  primer
tttacagaatttaatgtgtgtggg

SEQ ID NO: 127274 - DNA, 21 bp, Artificial Sequence
  primer
gcatatggcgtgtcacctgta

SEQ ID NO: 127275 - DNA, 22 bp, Artificial Sequence
  primer
tgcctgactaaagcctgttctc

SEQ ID NO: 127276 - DNA, 38 bp, Artificial Sequence
  primer
gtaaaacgacggccagtggagaaatagaggatggtggc

SEQ ID NO: 127277 - DNA, 21 bp, Artificial Sequence
  primer
ttcacctatcccttcactggc

SEQ ID NO: 127278 - DNA, 38 bp, Artificial Sequence
  primer
gtaaaacgacggccagtcatcgttagcttatcctcgcc

SEQ ID NO: 127279 - DNA, 37 bp, Artificial Sequence
  primer
gtaaaacgacggccagtacgtccgacctcttcctcag

SEQ ID NO: 127280 - DNA, 36 bp, Artificial Sequence
  primer
gtaaaacgacggccagtcctgcaccactccttctcc

SEQ ID NO: 127281 - DNA, 37 bp, Artificial Sequence
  primer
gtaaaacgacggccagtcttgacttctgagtcccgcc

SEQ ID NO: 127282 - DNA, 20 bp, Artificial Sequence
  primer
ggtccttgaatagcagcagg

SEQ ID NO: 127283 - DNA, 38 bp, Artificial Sequence
  primer
gtaaaacgacggccagtctggctatcttgagcaggagc

SEQ ID NO: 127284 - DNA, 20 bp, Artificial Sequence
  primer
agctgacaccttgggttctg

SEQ ID NO: 127285 - DNA, 20 bp, Artificial Sequence
  primer
actcagagcttcccagggtg

SEQ ID NO: 127286 - DNA, 20 bp, Artificial Sequence
  primer
gccaactaggttccgaggac

SEQ ID NO: 127287 - DNA, 21 bp, Artificial Sequence
  primer
cctgatgaagtggagcttgtc

SEQ ID NO: 127288 - DNA, 36 bp, Artificial Sequence
  primer
gtaaaacgacggccagtagggacaccagacgctcag

SEQ ID NO: 127289 - DNA, 38 bp, Artificial Sequence
  primer
gtaaaacgacggccagtcggtagctttgaggtttccag

SEQ ID NO: 127290 - DNA, 21 bp, Artificial Sequence
  primer
ccacttcagttgggatgagag

SEQ ID NO: 127291 - DNA, 22 bp, Artificial Sequence
  primer
caggtaaggaaacctaggaccc

SEQ ID NO: 127292 - DNA, 21 bp, Artificial Sequence
  primer
acagaggcaagagacagcagg

SEQ ID NO: 127293 - DNA, 21 bp, Artificial Sequence
  primer
aggtccacagctctgaaatcc

SEQ ID NO: 127294 - DNA, 22 bp, Artificial Sequence
  primer
gggacccaacttggtcagttac

SEQ ID NO: 127295 - DNA, 20 bp, Artificial Sequence
  primer
gtggagcctagaggtgtggc

SEQ ID NO: 127296 - DNA, 37 bp, Artificial Sequence
  primer
gtaaaacgacggccagtcgcccgataattatgcactg

SEQ ID NO: 127297 - DNA, 41 bp, Artificial Sequence
  primer
gtaaaacgacggccagtaaaggttcctttggtaaagttctg

SEQ ID NO: 127298 - DNA, 40 bp, Artificial Sequence
  primer
gtaaaacgacggccagttgtaagatcgataaaccaagccc

SEQ ID NO: 127299 - DNA, 21 bp, Artificial Sequence
  primer
caagttctgcttcagccaatg

SEQ ID NO: 127300 - DNA, 37 bp, Artificial Sequence
  primer
gtaaaacgacggccagtaatcgtccaaggttgtgtgg

SEQ ID NO: 127301 - DNA, 27 bp, Artificial Sequence
  primer
aaactgacttcaagatcaaactgtact

SEQ ID NO: 127302 - DNA, 41 bp, Artificial Sequence
  primer
gtaaaacgacggccagtaaaggtagaggccatatctgtttc

SEQ ID NO: 127303 - DNA, 25 bp, Artificial Sequence
  primer
ctgagcatttcacaattatgatgac

SEQ ID NO: 127304 - DNA, 37 bp, Artificial Sequence
  primer
gtaaaacgacggccagtttcactccctgttgactgcc

SEQ ID NO: 127305 - DNA, 37 bp, Artificial Sequence
  primer
gtaaaacgacggccagtcacctcaacctcacatgcag

SEQ ID NO: 127306 - DNA, 24 bp, Artificial Sequence
  primer
aaacggttcttaatcatccacatt

SEQ ID NO: 127307 - DNA, 42 bp, Artificial Sequence
  primer
gtaaaacgacggccagttctactttcacactgcattagcttc

SEQ ID NO: 127308 - DNA, 22 bp, Artificial Sequence
  primer
tgaactggttgaaaggaggaaa

SEQ ID NO: 127309 - DNA, 39 bp, Artificial Sequence
  primer
gtaaaacgacggccagttcaagagtggtgccttatcatc

SEQ ID NO: 127310 - DNA, 39 bp, Artificial Sequence
  primer
gtaaaacgacggccagtctatattaagggctttggctgc

SEQ ID NO: 127311 - DNA, 37 bp, Artificial Sequence; identical to SEQ ID NO: 16300
  primer

SEQ ID NO: 127312 - DNA, 42 bp, Artificial Sequence
  primer
gtaaaacgacggccagtgggaagtctggacatatttctcttc

SEQ ID NO: 127313 - DNA, 21 bp, Artificial Sequence
  primer
agcacaatctctgctcattgc

SEQ ID NO: 127314 - DNA, 23 bp, Artificial Sequence
  primer
tcactgtaaatggataagtgccc

SEQ ID NO: 127315 - DNA, 28 bp, Artificial Sequence
  primer
aattgcatagtaaagttacacataaccc

SEQ ID NO: 127316 - DNA, 38 bp, Artificial Sequence
  primer
gtaaaacgacggccagtacccagtccactggaaagttg

SEQ ID NO: 127317 - DNA, 38 bp, Artificial Sequence
  primer
gtaaaacgacggccagtctcccatcctccaccatttac

SEQ ID NO: 127318 - DNA, 38 bp, Artificial Sequence
  primer
gtaaaacgacggccagtcctcccagacacactacaggc

SEQ ID NO: 127319 - DNA, 25 bp, Artificial Sequence
  primer
aatccataatccagaactaaggagc

SEQ ID NO: 127320 - DNA, 21 bp, Artificial Sequence
  primer
aaggattcaaaccagtcccac

SEQ ID NO: 127321 - DNA, 43 bp, Artificial Sequence
  primer
gtaaaacgacggccagtggaagttcttgaagacattaaaccac

SEQ ID NO: 127322 - DNA, 42 bp, Artificial Sequence
  primer
gtaaaacgacggccagtgaacttgctatttctcagaaccatt

SEQ ID NO: 127323 - DNA, 39 bp, Artificial Sequence
  primer
gtaaaacgacggccagttgtttcctttctctgcttctgc

SEQ ID NO: 127324 - DNA, 38 bp, Artificial Sequence
  primer
gtaaaacgacggccagttcactgtgatctcgtttgtgg

SEQ ID NO: 127325 - DNA, 38 bp, Artificial Sequence
  primer
gtaaaacgacggccagtacagggagagcttgaggagtg

SEQ ID NO: 127326 - DNA, 38 bp, Artificial Sequence
  primer
gtaaaacgacggccagtcgtctgtcctccctgtctcag

SEQ ID NO: 127327 - DNA, 21 bp, Artificial Sequence
  primer
gctactatcaccagaccacgc

SEQ ID NO: 127328 - DNA, 37 bp, Artificial Sequence
  primer
gtaaaacgacggccagtagccctcaaagcttcctgtg

SEQ ID NO: 127329 - DNA, 21 bp, Artificial Sequence
  primer
cacaaggttgatgactgcacc

SEQ ID NO: 127330 - DNA, 37 bp, Artificial Sequence
  primer
gtaaaacgacggccagtggaggacttgctcttgggtc

SEQ ID NO: 127331 - DNA, 21 bp, Artificial Sequence
  primer
agaaagggtgagggcaatacc

SEQ ID NO: 127332 - DNA, 21 bp, Artificial Sequence
  primer
ctggagagatcggtttcaagg

SEQ ID NO: 127333 - DNA, 21 bp, Artificial Sequence
  primer
gtacttggctgatgtccaacc

SEQ ID NO: 127334 - DNA, 38 bp, Artificial Sequence
  primer
gtaaaacgacggccagtatactcgccctcaggtccttc

SEQ ID NO: 127335 - DNA, 38 bp, Artificial Sequence
  primer
gtaaaacgacggccagtcctcctcctcctctaagctcc

SEQ ID NO: 127336 - DNA, 21 bp, Artificial Sequence
  primer
ctccttaaccaggtggcattc

SEQ ID NO: 127337 - DNA, 21 bp, Artificial Sequence
  primer
ctcactccgtgtcatctcacc

SEQ ID NO: 127338 - DNA, 39 bp, Artificial Sequence
  primer
gtaaaacgacggccagtcagacacagacagaaacatggg

SEQ ID NO: 127339 - DNA, 37 bp, Artificial Sequence
  primer
gtaaaacgacggccagtctacctcctttccaccctgc

SEQ ID NO: 127340 - DNA, 21 bp, Artificial Sequence
  primer
agaagaaggaggtgagggtcc

SEQ ID NO: 127341 - DNA, 38 bp, Artificial Sequence
  primer
gtaaaacgacggccagttaaccctaaactgggcaatcg

SEQ ID NO: 127342 - DNA, 21 bp, Artificial Sequence
  primer
taactcccactgcagctcctc

SEQ ID NO: 127343 - DNA, 21 bp, Artificial Sequence
  primer
ttgcaacctcatggtatgtcc

SEQ ID NO: 127344 - DNA, 21 bp, Artificial Sequence
  primer
atagggaggagttgccagttg

SEQ ID NO: 127345 - DNA, 38 bp, Artificial Sequence
  primer
gtaaaacgacggccagtcagtaagaatggtctggcagc

SEQ ID NO: 127346 - DNA, 21 bp, Artificial Sequence
  primer
tcaaccaagccaggctagaag

SEQ ID NO: 127347 - DNA, 21 bp, Artificial Sequence
  primer
gctcagacctggtcctcactc

SEQ ID NO: 127348 - DNA, 21 bp, Artificial Sequence
  primer
ttagcctctccaggcagaaag

SEQ ID NO: 127349 - DNA, 19 bp, Artificial Sequence
  primer
ctcctctcccacgtgttgc

SEQ ID NO: 127350 - DNA, 38 bp, Artificial Sequence
  primer
gtaaaacgacggccagttggtgagcacgtcctgtctac

SEQ ID NO: 127351 - DNA, 38 bp, Artificial Sequence
  primer
gtaaaacgacggccagttcttgttcacaggcaatcagc

SEQ ID NO: 127352 - DNA, 21 bp, Artificial Sequence
  primer
ccgtgggtactgagaaagagg

SEQ ID NO: 127353 - DNA, 38 bp, Artificial Sequence
  primer
gtaaaacgacggccagtttggtaggtgatgttcctggg

SEQ ID NO: 127354 - DNA, 38 bp, Artificial Sequence
  primer
gtaaaacgacggccagtctcctgtcaccaacctacacg

SEQ ID NO: 127355 - DNA, 21 bp, Artificial Sequence
  primer
agtcgattacaagccaaagcc

SEQ ID NO: 127356 - DNA, 20 bp, Artificial Sequence
  primer
aagcagttcgcacactctcc

SEQ ID NO: 127357 - DNA, 38 bp, Artificial Sequence
  primer
gtaaaacgacggccagttgactttccaccatacctccc

SEQ ID NO: 127358 - DNA, 38 bp, Artificial Sequence
  primer
gtaaaacgacggccagtaccctagcaaccagatggaag

SEQ ID NO: 127359 - DNA, 21 bp, Artificial Sequence
  primer
accttgatgcctcttagccag

SEQ ID NO: 127360 - DNA, 38 bp, Artificial Sequence
  primer
gtaaaacgacggccagtgagttgggagagggaagaagc

SEQ ID NO: 127361 - DNA, 21 bp, Artificial Sequence
  primer
atctcaggaagctcctccctc

SEQ ID NO: 127362 - DNA, 21 bp, Artificial Sequence
  primer
tcttaacaccggacgagtcac

SEQ ID NO: 127363 - DNA, 22 bp, Artificial Sequence
  primer
gaggattggagttaaggaaccc

SEQ ID NO: 127364 - DNA, 18 bp, Artificial Sequence
  primer
aggcaggaagggcacaac

SEQ ID NO: 127365 - DNA, 21 bp, Artificial Sequence
  primer
caagggagaaagtgagatggg

SEQ ID NO: 127366 - DNA, 20 bp, Artificial Sequence
  primer
ctaggcgacagagcgagact

SEQ ID NO: 127367 - DNA, 21 bp, Artificial Sequence
  primer
ctgtaactgcaaagggagctg

SEQ ID NO: 127368 - DNA, 21 bp, Artificial Sequence
  primer
aggtgttgagaggctggtgag

SEQ ID NO: 127369 - DNA, 19 bp, Artificial Sequence
  primer
aggcaaaggatggcaacag

SEQ ID NO: 127370 - DNA, 44 bp, Artificial Sequence
  primer
gtaaaacgacggccagttgtgtaagttcttctgtaagagggaaa

SEQ ID NO: 127371 - DNA, 20 bp, Artificial Sequence
  primer
atatctgcccaagggagctg

SEQ ID NO: 127372 - DNA, 21 bp, Artificial Sequence
  primer
tcaatccttgcctatttgcac

SEQ ID NO: 127373 - DNA, 40 bp, Artificial Sequence
  primer
gtaaaacgacggccagtaatttgaaggcaattacagcatc

SEQ ID NO: 127374 - DNA, 40 bp, Artificial Sequence
  primer
gtaaaacgacggccagtggaaactgactggaaagcacttc

SEQ ID NO: 127375 - DNA, 21 bp, Artificial Sequence
  primer
aatggttatccaaggccacac

SEQ ID NO: 127376 - DNA, 35 bp, Artificial Sequence
  primer
gtaaaacgacggccagttcatggacagcccgagac

SEQ ID NO: 127377 - DNA, 25 bp, Artificial Sequence
  primer
atttaaactggtaacttcaaggctg

SEQ ID NO: 127378 - DNA, 20 bp, Artificial Sequence
  primer
ttggctaagcattgggtctg

SEQ ID NO: 127379 - DNA, 21 bp, Artificial Sequence
  primer
ctggagacagagcaagaccct

SEQ ID NO: 127380 - DNA, 40 bp, Artificial Sequence
  primer
gtaaaacgacggccagtacctctgcagattgtttatcctg

SEQ ID NO: 127381 - DNA, 41 bp, Artificial Sequence
  primer
gtaaaacgacggccagttcattgttgttaattgcattacgg

SEQ ID NO: 127382 - DNA, 25 bp, Artificial Sequence
  primer
cggataaagtgaagaacttcaaagg

SEQ ID NO: 127383 - DNA, 21 bp, Artificial Sequence
  primer
tcgtaccactacactccagcc

SEQ ID NO: 127384 - DNA, 22 bp, Artificial Sequence
  primer
tctgagcctcaagcaactacag

SEQ ID NO: 127385 - DNA, 40 bp, Artificial Sequence
  primer
gtaaaacgacggccagtttgtaactctgtgagtgaggcaa

SEQ ID NO: 127386 - DNA, 41 bp, Artificial Sequence
  primer
gtaaaacgacggccagttgtctactgaaggccaacaattac

SEQ ID NO: 127387 - DNA, 25 bp, Artificial Sequence
  primer
ccagaaacaattacctttatggctg

SEQ ID NO: 127388 - DNA, 42 bp, Artificial Sequence
  primer
gtaaaacgacggccagtcagtattcatcacgctgttactttc

SEQ ID NO: 127389 - DNA, 21 bp, Artificial Sequence
  primer
ctggctttgagcataatctgg

SEQ ID NO: 127390 - DNA, 39 bp, Artificial Sequence
  primer
gtaaaacgacggccagttgtcagtcctgttccttgttcc

SEQ ID NO: 127391 - DNA, 18 bp, Artificial Sequence
  primer
ataaaccaccgtgcccaa

SEQ ID NO: 127392 - DNA, 24 bp, Artificial Sequence
  primer
aaactgtccaactggattatttcc

SEQ ID NO: 127393 - DNA, 22 bp, Artificial Sequence
  primer
ccatgctcagccgagtatatta

SEQ ID NO: 127394 - DNA, 38 bp, Artificial Sequence
  primer
gtaaaacgacggccagtcctctatcggatctacctggg

SEQ ID NO: 127395 - DNA, 22 bp, Artificial Sequence
  primer
tcttaaatggtttgccctgaag

SEQ ID NO: 127396 - DNA, 26 bp, Artificial Sequence
  primer
tctgagtgaacagagtatatgggaat

SEQ ID NO: 127397 - DNA, 42 bp, Artificial Sequence
  primer
gtaaaacgacggccagttgacttcaaggacaaagaactttca

SEQ ID NO: 127398 - DNA, 21 bp, Artificial Sequence
  primer
gaacctggaacacagcatgag

SEQ ID NO: 127399 - DNA, 39 bp, Artificial Sequence
  primer
gtaaaacgacggccagtttgtcatttacatgccttgtcc

SEQ ID NO: 127400 - DNA, 38 bp, Artificial Sequence
  primer
gtaaaacgacggccagtggcatttgctggaaacttgac

SEQ ID NO: 127401 - DNA, 37 bp, Artificial Sequence
  primer
gtaaaacgacggccagtccagcccttcccttagacag

SEQ ID NO: 127402 - DNA, 21 bp, Artificial Sequence
  primer
agagggactccatacactcgc

SEQ ID NO: 127403 - DNA, 22 bp, Artificial Sequence
  primer
tgttgcattaaataatggtggc

SEQ ID NO: 127404 - DNA, 28 bp, Artificial Sequence
  primer
tcaataggtatgtcaggatttatttcaa

SEQ ID NO: 127405 - DNA, 24 bp, Artificial Sequence
  primer
ggtattagcactaaccgtgtgacc

SEQ ID NO: 127406 - DNA, 38 bp, Artificial Sequence
  primer
gtaaaacgacggccagtcttctccgggtcattacttcc

SEQ ID NO: 127407 - DNA, 18 bp, Artificial Sequence
  primer
ctcctgacctcgcgatcc

SEQ ID NO: 127408 - DNA, 24 bp, Artificial Sequence
  primer
tgtgatgctgactaaattctttcg

SEQ ID NO: 127409 - DNA, 22 bp, Artificial Sequence
  primer
tgattatctggttcccaacacc

SEQ ID NO: 127410 - DNA, 37 bp, Artificial Sequence
  primer
gtaaaacgacggccagtcacctcccttaatccctccc

SEQ ID NO: 127411 - DNA, 38 bp, Artificial Sequence
  primer
gtaaaacgacggccagttgaacaccaagaggtggtctg

SEQ ID NO: 127412 - DNA, 22 bp, Artificial Sequence
  primer
gactttgtgggttagctttcca

SEQ ID NO: 127413 - DNA, 38 bp, Artificial Sequence
  primer
gtaaaacgacggccagttgggaatctactcccacagac

SEQ ID NO: 127414 - DNA, 38 bp, Artificial Sequence
  primer
gtaaaacgacggccagtttctagccgagtttggactgg

SEQ ID NO: 127415 - DNA, 38 bp, Artificial Sequence
  primer
gtaaaacgacggccagtgaatgaaggcatgaacaatgg

SEQ ID NO: 127416 - DNA, 38 bp, Artificial Sequence
  primer
gtaaaacgacggccagttgttgtcacattaaacggtca

SEQ ID NO: 127417 - DNA, 38 bp, Artificial Sequence
  primer
gtaaaacgacggccagtgcttatggcataggattgctg

SEQ ID NO: 127418 - DNA, 45 bp, Artificial Sequence
  primer
gtaaaacgacggccagtgagtttacaaacaactgacttatccttg

SEQ ID NO: 127419 - DNA, 38 bp, Artificial Sequence
  primer
gtaaaacgacggccagtggtctcaggaccagaggacag

SEQ ID NO: 127420 - DNA, 21 bp, Artificial Sequence
  primer
tttcaagtgtagggctagggc

SEQ ID NO: 127421 - DNA, 38 bp, Artificial Sequence
  primer
gtaaaacgacggccagtaacagtcccgtttgtgaacag

SEQ ID NO: 127422 - DNA, 38 bp, Artificial Sequence
  primer
gtaaaacgacggccagtaagccttcctcctccaaagac

SEQ ID NO: 127423 - DNA, 36 bp, Artificial Sequence
  primer
gtaaaacgacggccagtgagaagcagagcgaatggg

SEQ ID NO: 127424 - DNA, 20 bp, Artificial Sequence
  primer
gtacagaggacggcgtgaac

SEQ ID NO: 127425 - DNA, 38 bp, Artificial Sequence
  primer
gtaaaacgacggccagtgacaaggaacaggacctggag

SEQ ID NO: 127426 - DNA, 37 bp, Artificial Sequence
  primer
gtaaaacgacggccagtgaccctacagctgggctctg

SEQ ID NO: 127427 - DNA, 38 bp, Artificial Sequence
  primer
gtaaaacgacggccagttgccttcagtgaggacacttg

SEQ ID NO: 127428 - DNA, 21 bp, Artificial Sequence
  primer
ggaccaatatgccatacccac

SEQ ID NO: 127429 - DNA, 38 bp, Artificial Sequence
  primer
gtaaaacgacggccagtcctcccaaactcattcagacc

SEQ ID NO: 127430 - DNA, 21 bp, Artificial Sequence
  primer
tgtaacgtgtggttctgaggg

SEQ ID NO: 127431 - DNA, 38 bp, Artificial Sequence
  primer
gtaaaacgacggccagtctttgggaagctctaggaccc

SEQ ID NO: 127432 - DNA, 38 bp, Artificial Sequence
  primer
gtaaaacgacggccagtagcgctgtctacacacaaagg

SEQ ID NO: 127433 - DNA, 37 bp, Artificial Sequence
  primer
gtaaaacgacggccagtaggcttgaggcacaacacag

SEQ ID NO: 127434 - DNA, 21 bp, Artificial Sequence
  primer
agcacagaatggtctggtgag

SEQ ID NO: 127435 - DNA, 21 bp, Artificial Sequence
  primer
ctgaccagcttccttccactc

SEQ ID NO: 127436 - DNA, 21 bp, Artificial Sequence
  primer
ctcaataaagctgcccaaagg

SEQ ID NO: 127437 - DNA, 43 bp, Artificial Sequence
  primer
gtaaaacgacggccagtaaacagaaactagcacccaaataaat

SEQ ID NO: 127438 - DNA, 21 bp, Artificial Sequence
  primer
gcagaagtctggaaagcaaag

SEQ ID NO: 127439 - DNA, 38 bp, Artificial Sequence
  primer
gtaaaacgacggccagtgcagggagggaaacagtgtag

SEQ ID NO: 127440 - DNA, 44 bp, Artificial Sequence
  primer
gtaaaacgacggccagtaaacacaagaatgactttgtaactgac

SEQ ID NO: 127441 - DNA, 22 bp, Artificial Sequence
  primer
gggactacaggcaagtaccacc

SEQ ID NO: 127442 - DNA, 21 bp, Artificial Sequence
  primer
tggttacaaatgatatggccc

SEQ ID NO: 127443 - DNA, 26 bp, Artificial Sequence
  primer
ccagtacaagaatattataggccctc

SEQ ID NO: 127444 - DNA, 35 bp, Artificial Sequence; identical to SEQ ID NO: 9356
  primer

SEQ ID NO: 127445 - DNA, 21 bp, Artificial Sequence
  primer
ccacagcgcccagtctactac

SEQ ID NO: 127446 - DNA, 22 bp, Artificial Sequence
  primer
gggttgtctcattgtcttaccc

SEQ ID NO: 127447 - DNA, 24 bp, Artificial Sequence
  primer
tggctgtttcatttgagtcaatac

SEQ ID NO: 127448 - DNA, 21 bp, Artificial Sequence
  primer
gcagccaagagatacgagagg

SEQ ID NO: 127449 - DNA, 39 bp, Artificial Sequence
  primer
gtaaaacgacggccagtaaatcaaggaccagaactgacc

SEQ ID NO: 127450 - DNA, 35 bp, Artificial Sequence
  primer
gtaaaacgacggccagtcctcaagcgaccctccag

SEQ ID NO: 127451 - DNA, 21 bp, Artificial Sequence
  primer
cacatgagccttatcattccc

SEQ ID NO: 127452 - DNA, 20 bp, Artificial Sequence
  primer
aagcaaccaccacgacaaag

SEQ ID NO: 127453 - DNA, 21 bp, Artificial Sequence
  primer
agaagcagcagcattagctcc

SEQ ID NO: 127454 - DNA, 21 bp, Artificial Sequence
  primer
cttcctaccaggaccaagctg

SEQ ID NO: 127455 - DNA, 21 bp, Artificial Sequence
  primer
gaagccaattccaataaacgc

SEQ ID NO: 127456 - DNA, 21 bp, Artificial Sequence
  primer
attggcagagaagagaggtgg

SEQ ID NO: 127457 - DNA, 38 bp, Artificial Sequence
  primer
gtaaaacgacggccagttctgctgaactgaaggagctg

SEQ ID NO: 127458 - DNA, 21 bp, Artificial Sequence
  primer
accaatccatgtgtgtaacgg

SEQ ID NO: 127459 - DNA, 21 bp, Artificial Sequence
  primer
atcctaacaccagaaggcagg

SEQ ID NO: 127460 - DNA, 38 bp, Artificial Sequence
  primer
gtaaaacgacggccagtggagaggagagattcatgccc

SEQ ID NO: 127461 - DNA, 20 bp, Artificial Sequence
  primer
actagcaaccgctgcacatc

SEQ ID NO: 127462 - DNA, 37 bp, Artificial Sequence
  primer
gtaaaacgacggccagtggtcaccacagtccgttagc

SEQ ID NO: 127463 - DNA, 21 bp, Artificial Sequence
  primer
tctatggtaggcagccctgag

SEQ ID NO: 127464 - DNA, 21 bp, Artificial Sequence
  primer
caagtgagctgtgactgcacc

SEQ ID NO: 127465 - DNA, 19 bp, Artificial Sequence
  primer
cccaacaggtctctggctc

SEQ ID NO: 127466 - DNA, 20 bp, Artificial Sequence
  primer
aagccatcacggtcattcag

SEQ ID NO: 127467 - DNA, 38 bp, Artificial Sequence
  primer
gtaaaacgacggccagttcgctgatgtcaaggtcattc

SEQ ID NO: 127468 - DNA, 38 bp, Artificial Sequence
  primer
gtaaaacgacggccagtttcaactcctgcactgtgacc

SEQ ID NO: 127469 - DNA, 21 bp, Artificial Sequence
  primer
tctgagctgggtctagaaggg

SEQ ID NO: 127470 - DNA, 37 bp, Artificial Sequence
  primer
gtaaaacgacggccagtaaatccaaacacctgccaag

SEQ ID NO: 127471 - DNA, 21 bp, Artificial Sequence
  primer
cctaaagggaggcagaggaag

SEQ ID NO: 127472 - DNA, 21 bp, Artificial Sequence
  primer
caagacagtctgagcacctgg

SEQ ID NO: 127473 - DNA, 21 bp, Artificial Sequence
  primer
ctgccatctcagcctttgttc

SEQ ID NO: 127474 - DNA, 21 bp, Artificial Sequence
  primer
cctctccctaggtctgaaggc

SEQ ID NO: 127475 - DNA, 36 bp, Artificial Sequence
  primer
gtaaaacgacggccagtgagctgaggtcaggccaag

SEQ ID NO: 127476 - DNA, 20 bp, Artificial Sequence
  primer
cgtacgatacaggacgtcgg

SEQ ID NO: 127477 - DNA, 37 bp, Artificial Sequence
  primer
gtaaaacgacggccagtggtaaggtgggagggtcttg

SEQ ID NO: 127478 - DNA, 20 bp, Artificial Sequence
  primer
ctatggagaccctcgggttg

SEQ ID NO: 127479 - DNA, 38 bp, Artificial Sequence
  primer
gtaaaacgacggccagtaaaggttgcttcgtcctcctt

SEQ ID NO: 127480 - DNA, 21 bp, Artificial Sequence
  primer
ggatggagatggactctgagg

SEQ ID NO: 127481 - DNA, 21 bp, Artificial Sequence
  primer
cctccagctcttcctggtact

SEQ ID NO: 127482 - DNA, 21 bp, Artificial Sequence
  primer
actgggattctgatttctccc

SEQ ID NO: 127483 - DNA, 21 bp, Artificial Sequence
  primer
gcctcctggtgaagaaagagt

SEQ ID NO: 127484 - DNA, 37 bp, Artificial Sequence
  primer
gtaaaacgacggccagtgagccagtaacagacagcgg

SEQ ID NO: 127485 - DNA, 21 bp, Artificial Sequence
  primer
ttatgttctcaggccatcagc

SEQ ID NO: 127486 - DNA, 21 bp, Artificial Sequence
  primer
actgcagcttgagaagaggtg

SEQ ID NO: 127487 - DNA, 21 bp, Artificial Sequence
  primer
gggagccatagggtgaataaa

SEQ ID NO: 127488 - DNA, 21 bp, Artificial Sequence
  primer
tcctctgcatgaagacactgg

SEQ ID NO: 127489 - DNA, 21 bp, Artificial Sequence
  primer
gcgagactccgtctcaaataa

SEQ ID NO: 127490 - DNA, 41 bp, Artificial Sequence
  primer
gtaaaacgacggccagttgtctactgagaatgacacttggg

SEQ ID NO: 127491 - DNA, 38 bp, Artificial Sequence
  primer
gtaaaacgacggccagttgttcgtatcctgggttccta

SEQ ID NO: 127492 - DNA, 38 bp, Artificial Sequence
  primer
gtaaaacgacggccagtaatgtccagtcatgtgttgcc

SEQ ID NO: 127493 - DNA, 20 bp, Artificial Sequence
  primer
tttcaggacagtgtgccaag

SEQ ID NO: 127494 - DNA, 22 bp, Artificial Sequence
  primer
ttgacctcatgctaaggaaagg

SEQ ID NO: 127495 - DNA, 38 bp, Artificial Sequence
  primer
gtaaaacgacggccagttgaccatcctgaggcagtaaa

SEQ ID NO: 127496 - DNA, 43 bp, Artificial Sequence
  primer
gtaaaacgacggccagtaaaggatgactataaattatgagggc

SEQ ID NO: 127497 - DNA, 21 bp, Artificial Sequence
  primer
atttgaatgacagtgtggccc

SEQ ID NO: 127498 - DNA, 41 bp, Artificial Sequence
  primer
gtaaaacgacggccagtcaacgaaggtaacaaggtaacaac

SEQ ID NO: 127499 - DNA, 21 bp, Artificial Sequence
  primer
ctcctgacctcaagtgatcca

SEQ ID NO: 127500 - DNA, 21 bp, Artificial Sequence
  primer
tgttatggcaacactgcactc

SEQ ID NO: 127501 - DNA, 38 bp, Artificial Sequence
  primer
gtaaaacgacggccagtgatttatgcagagcagctcca

SEQ ID NO: 127502 - DNA, 22 bp, Artificial Sequence
  primer
gcttccagaactgggtcctatc

SEQ ID NO: 127503 - DNA, 20 bp, Artificial Sequence
  primer
tagacacctgcctgggtgac

SEQ ID NO: 127504 - DNA, 40 bp, Artificial Sequence
  primer
gtaaaacgacggccagttccacctctaccaacacaaactg

SEQ ID NO: 127505 - DNA, 21 bp, Artificial Sequence
  primer
gaatgttgcctggattccttc

SEQ ID NO: 127506 - DNA, 38 bp, Artificial Sequence
  primer
gtaaaacgacggccagtaacgtgagatagaggatgcgg

SEQ ID NO: 127507 - DNA, 37 bp, Artificial Sequence
  primer
gtaaaacgacggccagtactgcagcttcttcccactg

SEQ ID NO: 127508 - DNA, 38 bp, Artificial Sequence
  primer
gtaaaacgacggccagtttctggaactgacctcttccc

SEQ ID NO: 127509 - DNA, 21 bp, Artificial Sequence
  primer
gagcccacatcagctctcttg

SEQ ID NO: 127510 - DNA, 38 bp, Artificial Sequence
  primer
gtaaaacgacggccagtgggacagaaggaaacggaaag

SEQ ID NO: 127511 - DNA, 37 bp, Artificial Sequence
  primer
gtaaaacgacggccagtctcactacccagctccctcc

SEQ ID NO: 127512 - DNA, 21 bp, Artificial Sequence
  primer
cagttccagcacagatgcaag

SEQ ID NO: 127513 - DNA, 37 bp, Artificial Sequence
  primer
gtaaaacgacggccagtcagaggaaccatacgccaag

SEQ ID NO: 127514 - DNA, 38 bp, Artificial Sequence
  primer
gtaaaacgacggccagtccctgtgagatccagacaagc

SEQ ID NO: 127515 - DNA, 21 bp, Artificial Sequence
  primer
gctgcctacatttggaggttc

SEQ ID NO: 127516 - DNA, 38 bp, Artificial Sequence
  primer
gtaaaacgacggccagttgacttgaacaaggcaagcag

SEQ ID NO: 127517 - DNA, 21 bp, Artificial Sequence
  primer
agacacttggctacgctcctc

SEQ ID NO: 127518 - DNA, 37 bp, Artificial Sequence
  primer
gtaaaacgacggccagtacaagagcccagacctcctc

SEQ ID NO: 127519 - DNA, 20 bp, Artificial Sequence
  primer
cctcagagaacactgccacc

SEQ ID NO: 127520 - DNA, 38 bp, Artificial Sequence
  primer
gtaaaacgacggccagtttggaagcctaaaccaagctc

SEQ ID NO: 127521 - DNA, 37 bp, Artificial Sequence
  primer
gtaaaacgacggccagtatccagaatcacatggcacc

SEQ ID NO: 127522 - DNA, 21 bp, Artificial Sequence
  primer
catggctctgcattaaggtcc

SEQ ID NO: 127523 - DNA, 38 bp, Artificial Sequence
  primer
gtaaaacgacggccagttcagaagctaggagcacatcg

SEQ ID NO: 127524 - DNA, 38 bp, Artificial Sequence
  primer
gtaaaacgacggccagtgcctacatatccactcccacc

SEQ ID NO: 127525 - DNA, 38 bp, Artificial Sequence
  primer
gtaaaacgacggccagtacacccatcctgtaccctcac

SEQ ID NO: 127526 - DNA, 21 bp, Artificial Sequence
  primer
tccctggaaactctggttctc

SEQ ID NO: 127527 - DNA, 21 bp, Artificial Sequence
  primer
gaagaccttggtggatgaagc

SEQ ID NO: 127528 - DNA, 37 bp, Artificial Sequence
  primer
gtaaaacgacggccagtagaatgttggtgggcaacag

SEQ ID NO: 127529 - DNA, 21 bp, Artificial Sequence
  primer
atttcccaattcattcctgcc

SEQ ID NO: 127530 - DNA, 37 bp, Artificial Sequence
  primer
gtaaaacgacggccagtaaactctgcccaatcgatcc

SEQ ID NO: 127531 - DNA, 38 bp, Artificial Sequence
  primer
gtaaaacgacggccagtcccaggtcacaccactacctg

SEQ ID NO: 127532 - DNA, 37 bp, Artificial Sequence
  primer
gtaaaacgacggccagtagggcataatacaccctccc

SEQ ID NO: 127533 - DNA, 37 bp, Artificial Sequence
  primer
gtaaaacgacggccagtcagatgaggagggtgctgtc

SEQ ID NO: 127534 - DNA, 38 bp, Artificial Sequence
  primer
gtaaaacgacggccagtgcaggtcctagagcacgagag

SEQ ID NO: 127535 - DNA, 21 bp, Artificial Sequence
  primer
ctgggcaacaaagtgaaactc

SEQ ID NO: 127536 - DNA, 38 bp, Artificial Sequence
  primer
gtaaaacgacggccagtaacaagccatcaaatcactgg

SEQ ID NO: 127537 - DNA, 38 bp, Artificial Sequence
  primer
gtaaaacgacggccagtaataccttgatgagcccaagc

SEQ ID NO: 127538 - DNA, 23 bp, Artificial Sequence
  primer
caaagatgctattcctgcacttc

SEQ ID NO: 127539 - DNA, 37 bp, Artificial Sequence
  primer
gtaaaacgacggccagttgtgtcgctgttctctctgc

SEQ ID NO: 127540 - DNA, 21 bp, Artificial Sequence
  primer
cactttgtcaaatgagcctcc

SEQ ID NO: 127541 - DNA, 21 bp, Artificial Sequence
  primer
aggtccgtgtatgctggtagg

SEQ ID NO: 127542 - DNA, 23 bp, Artificial Sequence
  primer
tgctttgtagctcctcaccatac

SEQ ID NO: 127543 - DNA, 38 bp, Artificial Sequence
  primer
gtaaaacgacggccagttgagcttatccctgaaccaac

SEQ ID NO: 127544 - DNA, 38 bp, Artificial Sequence
  primer
gtaaaacgacggccagttttgaaacactcccaaactgg

SEQ ID NO: 127545 - DNA, 37 bp, Artificial Sequence
  primer
gtaaaacgacggccagtcagatgtgagccattgtgcc

SEQ ID NO: 127546 - DNA, 21 bp, Artificial Sequence
  primer
ccacagttattcggatccagc

SEQ ID NO: 127547 - DNA, 23 bp, Artificial Sequence
  primer
tttatcgatttagctccaaagcc

SEQ ID NO: 127548 - DNA, 22 bp, Artificial Sequence
  primer
tgacctgacatttgaagtagcg

SEQ ID NO: 127549 - DNA, 38 bp, Artificial Sequence
  primer
gtaaaacgacggccagtataggaaagctggtttgccac

SEQ ID NO: 127550 - DNA, 38 bp, Artificial Sequence
  primer
gtaaaacgacggccagtcacgctagggaaaggagaaag

SEQ ID NO: 127551 - DNA, 18 bp, Artificial Sequence
  primer
ctatcctcccgcctcgac

SEQ ID NO: 127552 - DNA, 23 bp, Artificial Sequence
  primer
ttagcaaggttctcaagttctcg

SEQ ID NO: 127553 - DNA, 21 bp, Artificial Sequence
  primer
cagaagatcaactgccacagc

SEQ ID NO: 127554 - DNA, 43 bp, Artificial Sequence
  primer
gtaaaacgacggccagtcataacagagaccaggtttaaagtcc

SEQ ID NO: 127555 - DNA, 21 bp, Artificial Sequence
  primer
taacagcaacaatgaccacgg

SEQ ID NO: 127556 - DNA, 38 bp, Artificial Sequence
  primer
gtaaaacgacggccagtttaccctgtcccacagtctcc

SEQ ID NO: 127557 - DNA, 39 bp, Artificial Sequence
  primer
gtaaaacgacggccagttttagagacagacagcgaaggc

SEQ ID NO: 127558 - DNA, 20 bp, Artificial Sequence
  primer
atttgcagcagcttggtttg

SEQ ID NO: 127559 - DNA, 21 bp, Artificial Sequence
  primer
tcgtcccatgtcaccttgtag

SEQ ID NO: 127560 - DNA, 21 bp, Artificial Sequence
  primer
tccctagtgggtaactgagcc

SEQ ID NO: 127561 - DNA, 21 bp, Artificial Sequence
  primer
gcatgtggagatacaagccag

SEQ ID NO: 127562 - DNA, 38 bp, Artificial Sequence
  primer
gtaaaacgacggccagtaaaggcaagtcactgaggctg

SEQ ID NO: 127563 - DNA, 38 bp, Artificial Sequence
  primer
gtaaaacgacggccagtggctgaggatcttgttcttcc

SEQ ID NO: 127564 - DNA, 38 bp, Artificial Sequence
  primer
gtaaaacgacggccagtaaccatgtggctgattcagtg

SEQ ID NO: 127565 - DNA, 18 bp, Artificial Sequence
  primer
agctccagggccaacttc

SEQ ID NO: 127566 - DNA, 20 bp, Artificial Sequence
  primer
gtgcaatggcacgatctgag

SEQ ID NO: 127567 - DNA, 20 bp, Artificial Sequence
  primer
ggaagccatgagtactgccc

SEQ ID NO: 127568 - DNA, 21 bp, Artificial Sequence
  primer
ctgcagaaggctgtagtcctg

SEQ ID NO: 127569 - DNA, 21 bp, Artificial Sequence
  primer
caaggtcggcagtttagcttc

SEQ ID NO: 127570 - DNA, 21 bp, Artificial Sequence
  primer
tgtacacgaaagcttggttgg

SEQ ID NO: 127571 - DNA, 38 bp, Artificial Sequence
  primer
gtaaaacgacggccagttttcccatcaatagccacctc

SEQ ID NO: 127572 - DNA, 38 bp, Artificial Sequence
  primer
gtaaaacgacggccagtgcatggcgtatttgtgaaatg

SEQ ID NO: 127573 - DNA, 38 bp, Artificial Sequence
  primer
gtaaaacgacggccagtcaaatcctccaaggcaaagtg

SEQ ID NO: 127574 - DNA, 23 bp, Artificial Sequence
  primer
ttatactgcagttgcatttgctt

SEQ ID NO: 127575 - DNA, 38 bp, Artificial Sequence
  primer
gtaaaacgacggccagtcgaagtttggcctcttctcag

SEQ ID NO: 127576 - DNA, 38 bp, Artificial Sequence
  primer
gtaaaacgacggccagttctccgacctcgagagtcttc

SEQ ID NO: 127577 - DNA, 39 bp, Artificial Sequence
  primer
gtaaaacgacggccagtgggctgcagagggttatatttc

SEQ ID NO: 127578 - DNA, 37 bp, Artificial Sequence
  primer
gtaaaacgacggccagttacaagcatgagccactgcc

SEQ ID NO: 127579 - DNA, 25 bp, Artificial Sequence
  primer
ccaaatactgaactcctgtaaccaa

SEQ ID NO: 127580 - DNA, 20 bp, Artificial Sequence
  primer
tgccgatggtacatagaggc

SEQ ID NO: 127581 - DNA, 38 bp, Artificial Sequence
  primer
gtaaaacgacggccagtagaaatgaggccagagacagc

SEQ ID NO: 127582 - DNA, 21 bp, Artificial Sequence
  primer
aagggaagtagttggcccttc

SEQ ID NO: 127583 - DNA, 21 bp, Artificial Sequence
  primer
agcggaaagatctgaggattg

SEQ ID NO: 127584 - DNA, 22 bp, Artificial Sequence
  primer
gcctcaggatgatgttcaagac

SEQ ID NO: 127585 - DNA, 37 bp, Artificial Sequence
  primer
gtaaaacgacggccagtcagttcaggcctctcctgtg

SEQ ID NO: 127586 - DNA, 37 bp, Artificial Sequence
  primer
gtaaaacgacggccagtgtgactgcgaagaagccaac

SEQ ID NO: 127587 - DNA, 21 bp, Artificial Sequence
  primer
agaagggaagaagctgctgag

SEQ ID NO: 127588 - DNA, 20 bp, Artificial Sequence
  primer
ctcttggcttccagcagatg

SEQ ID NO: 127589 - DNA, 21 bp, Artificial Sequence
  primer
tctgtgtatctggcatggtgg

SEQ ID NO: 127590 - DNA, 21 bp, Artificial Sequence
  primer
gggcaggacttaccatcactg

SEQ ID NO: 127591 - DNA, 21 bp, Artificial Sequence
  primer
ttctcgatgtcgctgttcttg

SEQ ID NO: 127592 - DNA, 21 bp, Artificial Sequence
  primer
cacagagtcacgcttagcacc

SEQ ID NO: 127593 - DNA, 38 bp, Artificial Sequence
  primer
gtaaaacgacggccagtcgagtacgagtcctagggagg

SEQ ID NO: 127594 - DNA, 21 bp, Artificial Sequence
  primer
aaatatcctggctcctggctc

SEQ ID NO: 127595 - DNA, 39 bp, Artificial Sequence
  primer
gtaaaacgacggccagttgtgtgtgtacgcatgtttgag

SEQ ID NO: 127596 - DNA, 20 bp, Artificial Sequence
  primer
tcatgcctcaaccctctttg

SEQ ID NO: 127597 - DNA, 43 bp, Artificial Sequence
  primer
gtaaaacgacggccagttgtctaactgttcttctccattaggg

SEQ ID NO: 127598 - DNA, 23 bp, Artificial Sequence
  primer
aatgattaaatccaggtgtgctg

SEQ ID NO: 127599 - DNA, 22 bp, Artificial Sequence
  primer
cattcagtggactacacaaggc

SEQ ID NO: 127600 - DNA, 22 bp, Artificial Sequence
  primer
caaattcagcagcaaaggaaag

SEQ ID NO: 127601 - DNA, 43 bp, Artificial Sequence
  primer
gtaaaacgacggccagtgatttaatctcattatgaactcccaa

SEQ ID NO: 127602 - DNA, 21 bp, Artificial Sequence
  primer
accgaaaggccaagtaatgtg

SEQ ID NO: 127603 - DNA, 37 bp, Artificial Sequence
  primer
gtaaaacgacggccagtacccgaatgaacctggagag

SEQ ID NO: 127604 - DNA, 22 bp, Artificial Sequence
  primer
cagagcttacatcgggaaacac

SEQ ID NO: 127605 - DNA, 37 bp, Artificial Sequence
  primer
gtaaaacgacggccagtagaggaccgaggttgagagg

SEQ ID NO: 127606 - DNA, 38 bp, Artificial Sequence
  primer
gtaaaacgacggccagtaagcttcaggtgagggagatg

SEQ ID NO: 127607 - DNA, 20 bp, Artificial Sequence
  primer
ccactgaaggtgcaaagagc

SEQ ID NO: 127608 - DNA, 38 bp, Artificial Sequence
  primer
gtaaaacgacggccagtagcaggtagaagcctccacag

SEQ ID NO: 127609 - DNA, 20 bp, Artificial Sequence
  primer
tcgtggcaagctctgatctc

SEQ ID NO: 127610 - DNA, 38 bp, Artificial Sequence
  primer
gtaaaacgacggccagtaagggaagttcaggcattgag

SEQ ID NO: 127611 - DNA, 38 bp, Artificial Sequence
  primer
gtaaaacgacggccagtttccctaggagtgcagaccac

SEQ ID NO: 127612 - DNA, 38 bp, Artificial Sequence
  primer
gtaaaacgacggccagttttggaaggaaagagcctgag

SEQ ID NO: 127613 - DNA, 21 bp, Artificial Sequence
  primer
cagagcccagcaccttatacc

SEQ ID NO: 127614 - DNA, 38 bp, Artificial Sequence
  primer
gtaaaacgacggccagtccctactcgaagggcattagg

SEQ ID NO: 127615 - DNA, 36 bp, Artificial Sequence
  primer
gtaaaacgacggccagtccgacgtgaagacgttgac

SEQ ID NO: 127616 - DNA, 37 bp, Artificial Sequence
  primer
gtaaaacgacggccagtagtagcacctgggagctgtg

SEQ ID NO: 127617 - DNA, 20 bp, Artificial Sequence
  primer
tcccacaactttcaacctgc

SEQ ID NO: 127618 - DNA, 38 bp, Artificial Sequence
  primer
gtaaaacgacggccagtaaatgctttcacgttcagtgc

SEQ ID NO: 127619 - DNA, 38 bp, Artificial Sequence
  primer
gtaaaacgacggccagtatgaggctttacatccttccg

SEQ ID NO: 127620 - DNA, 37 bp, Artificial Sequence
  primer
gtaaaacgacggccagtagcccaagacagcatgagag

SEQ ID NO: 127621 - DNA, 21 bp, Artificial Sequence
  primer
ttcattccacagcacgacaac

SEQ ID NO: 127622 - DNA, 40 bp, Artificial Sequence
  primer
gtaaaacgacggccagttgggaaccaaactctgagaaatc

SEQ ID NO: 127623 - DNA, 19 bp, Artificial Sequence
  primer
cttcagcacggagacccat

SEQ ID NO: 127624 - DNA, 38 bp, Artificial Sequence
  primer
gtaaaacgacggccagtaaagagctggagctgttggag

SEQ ID NO: 127625 - DNA, 21 bp, Artificial Sequence
  primer
gctctgaagcacacagtaggg

SEQ ID NO: 127626 - DNA, 39 bp, Artificial Sequence
  primer
gtaaaacgacggccagtcattctccaaacattccagtcc

SEQ ID NO: 127627 - DNA, 38 bp, Artificial Sequence
  primer
gtaaaacgacggccagtgggcaggaatagctcaacctc

SEQ ID NO: 127628 - DNA, 20 bp, Artificial Sequence
  primer
cctggacctgtgttctcagc

SEQ ID NO: 127629 - DNA, 21 bp, Artificial Sequence
  primer
ggatctgaacccagatcaacg

SEQ ID NO: 127630 - DNA, 21 bp, Artificial Sequence
  primer
gctgacctatctccctgcatc

SEQ ID NO: 127631 - DNA, 21 bp, Artificial Sequence
  primer
gcctggaagatctcaaggatg

SEQ ID NO: 127632 - DNA, 20 bp, Artificial Sequence
  primer
catgccctacacacaggacc

SEQ ID NO: 127633 - DNA, 37 bp, Artificial Sequence
  primer
gtaaaacgacggccagttgtgcttctcacaccactgc

SEQ ID NO: 127634 - DNA, 20 bp, Artificial Sequence
  primer
agcgccacactgtcacagac

SEQ ID NO: 127635 - DNA, 21 bp, Artificial Sequence
  primer
accaccaggtaggaatgatgg

SEQ ID NO: 127636 - DNA, 21 bp, Artificial Sequence
  primer
gctcagggtcacacaaatgac

SEQ ID NO: 127637 - DNA, 38 bp, Artificial Sequence
  primer
gtaaaacgacggccagtccagcctttatttgatctccg

SEQ ID NO: 127638 - DNA, 37 bp, Artificial Sequence
  primer
gtaaaacgacggccagttgtgatccaccactgtgctc

SEQ ID NO: 127639 - DNA, 21 bp, Artificial Sequence
  primer
ctacgcctgcgttcctctatc

SEQ ID NO: 127640 - DNA, 19 bp, Artificial Sequence
  primer
agagtcagcatgggttggg

SEQ ID NO: 127641 - DNA, 21 bp, Artificial Sequence
  primer
ccaccaccatacagacatccc

SEQ ID NO: 127642 - DNA, 21 bp, Artificial Sequence
  primer
cttcctttgggaaatgtggtc

SEQ ID NO: 127643 - DNA, 23 bp, Artificial Sequence
  primer
tgcctaatgatcacactaacacc

SEQ ID NO: 127644 - DNA, 19 bp, Artificial Sequence
  primer
cacatggcaggtgttccac

SEQ ID NO: 127645 - DNA, 26 bp, Artificial Sequence
  primer
cataactatttcaggatccctgtgtc

SEQ ID NO: 127646 - DNA, 40 bp, Artificial Sequence
  primer
gtaaaacgacggccagtgcaaatctaggttaaggtaccca

SEQ ID NO: 127647 - DNA, 21 bp, Artificial Sequence
  primer
agtccaatttggcttgagagc

SEQ ID NO: 127648 - DNA, 40 bp, Artificial Sequence
  primer
gtaaaacgacggccagtactgacccagacattcaaatgag

SEQ ID NO: 127649 - DNA, 38 bp, Artificial Sequence
  primer
gtaaaacgacggccagtacttaaatcccagccttaccg

SEQ ID NO: 127650 - DNA, 42 bp, Artificial Sequence
  primer
gtaaaacgacggccagtgcctctatctccaattatttcaagc

SEQ ID NO: 127651 - DNA, 35 bp, Artificial Sequence
  primer
gtaaaacgacggccagtttcactgtgcccagccag

SEQ ID NO: 127652 - DNA, 38 bp, Artificial Sequence
  primer
gtaaaacgacggccagttttcaagaccattccaaacaa

SEQ ID NO: 127653 - DNA, 38 bp, Artificial Sequence
  primer
gtaaaacgacggccagtcattgtctttgcatacctccc

SEQ ID NO: 127654 - DNA, 23 bp, Artificial Sequence
  primer
gcttgaaccaaagaaagaacttg

SEQ ID NO: 127655 - DNA, 39 bp, Artificial Sequence
  primer
gtaaaacgacggccagtgatatttctcccgccgatattc

SEQ ID NO: 127656 - DNA, 21 bp, Artificial Sequence
  primer
gctgtgatcgagccactgtaa

SEQ ID NO: 127657 - DNA, 25 bp, Artificial Sequence
  primer
gtgcatcttattaacaacctaaccc

SEQ ID NO: 127658 - DNA, 21 bp, Artificial Sequence
  primer
agctgcgtgagagagtacagg

SEQ ID NO: 127659 - DNA, 43 bp, Artificial Sequence
  primer
gtaaaacgacggccagttcaatatatgacacaacaagaggagg

SEQ ID NO: 127660 - DNA, 25 bp, Artificial Sequence
  primer
ttagaacccaactggaataagaatc

SEQ ID NO: 127661 - DNA, 21 bp, Artificial Sequence
  primer
tgtgtatgcctgttctggtcc

SEQ ID NO: 127662 - DNA, 24 bp, Artificial Sequence
  primer
aagctaagaagacactcaggttgg

SEQ ID NO: 127663 - DNA, 21 bp, Artificial Sequence
  primer
ttcagcataaggctggaaacc

SEQ ID NO: 127664 - DNA, 40 bp, Artificial Sequence
  primer
gtaaaacgacggccagtcccacaatcctgttctctaaatg

SEQ ID NO: 127665 - DNA, 38 bp, Artificial Sequence
  primer
gtaaaacgacggccagtaatgaacctcgatgtgtgacg

SEQ ID NO: 127666 - DNA, 38 bp, Artificial Sequence
  primer
gtaaaacgacggccagttttccttgtccaccaaactcc

SEQ ID NO: 127667 - DNA, 39 bp, Artificial Sequence
  primer
gtaaaacgacggccagtcccaggaccaaatgattatgac

SEQ ID NO: 127668 - DNA, 21 bp, Artificial Sequence
  primer
agtcttgctcaatgctcttgc

SEQ ID NO: 127669 - DNA, 37 bp, Artificial Sequence
  primer
gtaaaacgacggccagttttgatgaaattgctctgcg

SEQ ID NO: 127670 - DNA, 21 bp, Artificial Sequence
  primer
acactgaggacagtggctacc

SEQ ID NO: 127671 - DNA, 21 bp, Artificial Sequence
  primer
ctgtgccctgccttaaacaac

SEQ ID NO: 127672 - DNA, 38 bp, Artificial Sequence
  primer
gtaaaacgacggccagtacccacagcatgttcacaaag

SEQ ID NO: 127673 - DNA, 39 bp, Artificial Sequence
  primer
gtaaaacgacggccagtaacattcattggaagaaccagg

SEQ ID NO: 127674 - DNA, 22 bp, Artificial Sequence
  primer
ttatgccaatactggtgctctg

SEQ ID NO: 127675 - DNA, 39 bp, Artificial Sequence
  primer
gtaaaacgacggccagtgagacagtgtcatcgtctgtgg

SEQ ID NO: 127676 - DNA, 38 bp, Artificial Sequence
  primer
gtaaaacgacggccagtccaaacgaggtgaaacaagtg

SEQ ID NO: 127677 - DNA, 20 bp, Artificial Sequence
  primer
tttccagccactctttgtgg

SEQ ID NO: 127678 - DNA, 38 bp, Artificial Sequence
  primer
gtaaaacgacggccagtctacttggtcactgtctgccc

SEQ ID NO: 127679 - DNA, 39 bp, Artificial Sequence
  primer
gtaaaacgacggccagttgtggtagacgcattacacagg

SEQ ID NO: 127680 - DNA, 24 bp, Artificial Sequence
  primer
gccaacaattcgacttggtattag

SEQ ID NO: 127681 - DNA, 27 bp, Artificial Sequence
  primer
tgagacctaatgacagtaaggttgttc

SEQ ID NO: 127682 - DNA, 38 bp, Artificial Sequence
  primer
gtaaaacgacggccagtacctacaggtgggttacaggc

SEQ ID NO: 127683 - DNA, 38 bp, Artificial Sequence
  primer
gtaaaacgacggccagttttatgcaccgacccaatatg

SEQ ID NO: 127684 - DNA, 21 bp, Artificial Sequence
  primer
gatggaggcaaatgctctctt

SEQ ID NO: 127685 - DNA, 39 bp, Artificial Sequence
  primer
gtaaaacgacggccagtatgagaaccagacagcttcacc

SEQ ID NO: 127686 - DNA, 21 bp, Artificial Sequence
  primer
gttccttccttgctccaaatg

SEQ ID NO: 127687 - DNA, 37 bp, Artificial Sequence
  primer
gtaaaacgacggccagttttgtcactggcttcttccg

SEQ ID NO: 127688 - DNA, 21 bp, Artificial Sequence
  primer
agttgtgctgcttcagtttgc

SEQ ID NO: 127689 - DNA, 21 bp, Artificial Sequence
  primer
tagccctttcccattctgttg

SEQ ID NO: 127690 - DNA, 38 bp, Artificial Sequence
  primer
gtaaaacgacggccagtcggtgtggactacaggacaag

SEQ ID NO: 127691 - DNA, 21 bp, Artificial Sequence
  primer
gccattatctttatgcctggg

SEQ ID NO: 127692 - DNA, 23 bp, Artificial Sequence
  primer
gacagacatttggattacttggc

SEQ ID NO: 127693 - DNA, 22 bp, Artificial Sequence
  primer
caaacatcaaccagagaatggg

SEQ ID NO: 127694 - DNA, 21 bp, Artificial Sequence
  primer
tgcgtttatgtggttgtttcc

SEQ ID NO: 127695 - DNA, 37 bp, Artificial Sequence
  primer
gtaaaacgacggccagtccgtgctgaacaagagtcac

SEQ ID NO: 127696 - DNA, 21 bp, Artificial Sequence
  primer
gtctccagcagggagcagtag

SEQ ID NO: 127697 - DNA, 38 bp, Artificial Sequence
  primer
gtaaaacgacggccagttggtttccatctgtttccctc

SEQ ID NO: 127698 - DNA, 21 bp, Artificial Sequence
  primer
cagagcaggatagaggttggg

SEQ ID NO: 127699 - DNA, 21 bp, Artificial Sequence
  primer
ctggaagatggctggaatagg

SEQ ID NO: 127700 - DNA, 38 bp, Artificial Sequence
  primer
gtaaaacgacggccagtgtctgcagggagtcagtaccc

SEQ ID NO: 127701 - DNA, 22 bp, Artificial Sequence
  primer
tgcttggacaagatcattcctc

SEQ ID NO: 127702 - DNA, 19 bp, Artificial Sequence
  primer
gcctccgtcctctccctac

SEQ ID NO: 127703 - DNA, 22 bp, Artificial Sequence
  primer
tgaggtcaaactagacagcgtg

SEQ ID NO: 127704 - DNA, 24 bp, Artificial Sequence
  primer
tgagcttcaactgaagtgatcttg

SEQ ID NO: 127705 - DNA, 21 bp, Artificial Sequence
  primer
aagaacgggctccttcatttc

SEQ ID NO: 127706 - DNA, 38 bp, Artificial Sequence
  primer
gtaaaacgacggccagtctcaatcatgccacaaagagg

SEQ ID NO: 127707 - DNA, 21 bp, Artificial Sequence
  primer
catcctgcacagaacaaggag

SEQ ID NO: 127708 - DNA, 21 bp, Artificial Sequence
  primer
gcgattacttgcaggtgtgtc

SEQ ID NO: 127709 - DNA, 21 bp, Artificial Sequence
  primer
tgtgaatgtgtgtgaacacgg

SEQ ID NO: 127710 - DNA, 38 bp, Artificial Sequence
  primer
gtaaaacgacggccagttcattgtcagtgtttccaggg

SEQ ID NO: 127711 - DNA, 36 bp, Artificial Sequence
  primer
gtaaaacgacggccagttttcccatcacacacacgc

SEQ ID NO: 127712 - DNA, 21 bp, Artificial Sequence
  primer
ccactaggcatcttaccagcc

SEQ ID NO: 127713 - DNA, 21 bp, Artificial Sequence
  primer
gtgaaggaatcatttcctggc

SEQ ID NO: 127714 - DNA, 21 bp, Artificial Sequence
  primer
agggaacatgggactctcctc

SEQ ID NO: 127715 - DNA, 37 bp, Artificial Sequence
  primer
gtaaaacgacggccagtagctcttagcccagaggctg

SEQ ID NO: 127716 - DNA, 21 bp, Artificial Sequence
  primer
ctgctgctgctgtcaagaatc

SEQ ID NO: 127717 - DNA, 39 bp, Artificial Sequence
  primer
gtaaaacgacggccagtcctaccagagagaggagaaggg

SEQ ID NO: 127718 - DNA, 38 bp, Artificial Sequence
  primer
gtaaaacgacggccagtggagggtctgggtcttgagtc

SEQ ID NO: 127719 - DNA, 22 bp, Artificial Sequence
  primer
tgagataccagtcctctgaccc

SEQ ID NO: 127720 - DNA, 38 bp, Artificial Sequence
  primer
gtaaaacgacggccagttatgttggtcaggctggtctc

SEQ ID NO: 127721 - DNA, 40 bp, Artificial Sequence
  primer
gtaaaacgacggccagtcaggtttagcatacaacaccacc

SEQ ID NO: 127722 - DNA, 38 bp, Artificial Sequence
  primer
gtaaaacgacggccagtaatcagacttggctgtccagg

SEQ ID NO: 127723 - DNA, 21 bp, Artificial Sequence
  primer
caccatcagaaggccctagtc

SEQ ID NO: 127724 - DNA, 40 bp, Artificial Sequence
  primer
gtaaaacgacggccagtgagcagcatcctatgaaacaaag

SEQ ID NO: 127725 - DNA, 22 bp, Artificial Sequence
  primer
caatggaacagtcacctaagcc

SEQ ID NO: 127726 - DNA, 21 bp, Artificial Sequence
  primer
ctaacctcttccagtgcaccc

SEQ ID NO: 127727 - DNA, 21 bp, Artificial Sequence
  primer
ttggaactgtgtgggagacac

SEQ ID NO: 127728 - DNA, 38 bp, Artificial Sequence
  primer
gtaaaacgacggccagttattccagccaccaagtaccc

SEQ ID NO: 127729 - DNA, 20 bp, Artificial Sequence
  primer
tcggtaggagaaagcagcag

SEQ ID NO: 127730 - DNA, 38 bp, Artificial Sequence
  primer
gtaaaacgacggccagtacagagacacacagcccacag

SEQ ID NO: 127731 - DNA, 38 bp, Artificial Sequence
  primer
gtaaaacgacggccagtaaacctcttcagaggcacagc

SEQ ID NO: 127732 - DNA, 38 bp, Artificial Sequence
  primer
gtaaaacgacggccagttgccatcacgcagagttagag

SEQ ID NO: 127733 - DNA, 21 bp, Artificial Sequence
  primer
actgcaggctagaaccagtcc

SEQ ID NO: 127734 - DNA, 38 bp, Artificial Sequence
  primer
gtaaaacgacggccagtattatgtccaagtgcccaacc

SEQ ID NO: 127735 - DNA, 21 bp, Artificial Sequence
  primer
gtgtgacgagatgcagcaaac

SEQ ID NO: 127736 - DNA, 21 bp, Artificial Sequence
  primer
caactctaggcctgtgtgtgc

SEQ ID NO: 127737 - DNA, 38 bp, Artificial Sequence
  primer
gtaaaacgacggccagtgaaagacactttccagggcac

SEQ ID NO: 127738 - DNA, 38 bp, Artificial Sequence
  primer
gtaaaacgacggccagtacatgcactgcaagggtaatg

SEQ ID NO: 127739 - DNA, 21 bp, Artificial Sequence
  primer
actctgcctttagccaggttg

SEQ ID NO: 127740 - DNA, 21 bp, Artificial Sequence
  primer
ggatggtgctcagattcacac

SEQ ID NO: 127741 - DNA, 38 bp, Artificial Sequence
  primer
gtaaaacgacggccagtttaaggcagaacccacctctg

SEQ ID NO: 127742 - DNA, 38 bp, Artificial Sequence
  primer
gtaaaacgacggccagttcctccttattcacacagggc

SEQ ID NO: 127743 - DNA, 38 bp, Artificial Sequence
  primer
gtaaaacgacggccagtccctagaggttgaggctgttg

SEQ ID NO: 127744 - DNA, 21 bp, Artificial Sequence
  primer
tcctcaactggtgtgtcatcc

SEQ ID NO: 127745 - DNA, 21 bp, Artificial Sequence
  primer
tatcgtttacctcagggccag

SEQ ID NO: 127746 - DNA, 21 bp, Artificial Sequence
  primer
tgtggctcagactaagttcgg

SEQ ID NO: 127747 - DNA, 38 bp, Artificial Sequence
  primer
gtaaaacgacggccagttggctcattgagaaactctgg

SEQ ID NO: 127748 - DNA, 36 bp, Artificial Sequence
  primer
gtaaaacgacggccagtggagctcagggcagaaagg

SEQ ID NO: 127749 - DNA, 38 bp, Artificial Sequence
  primer
gtaaaacgacggccagtgtgaagtggaaaggatttggg

SEQ ID NO: 127750 - DNA, 20 bp, Artificial Sequence
  primer
atggctttgggatccagttc

SEQ ID NO: 127751 - DNA, 21 bp, Artificial Sequence
  primer
gccttgtttgaccacttctcc

SEQ ID NO: 127752 - DNA, 38 bp, Artificial Sequence
  primer
gtaaaacgacggccagttggcacaaagtctggttcttc

SEQ ID NO: 127753 - DNA, 38 bp, Artificial Sequence
  primer
gtaaaacgacggccagtgaagcttgtccctcaaaccac

SEQ ID NO: 127754 - DNA, 38 bp, Artificial Sequence
  primer
gtaaaacgacggccagtaggtctagatgagctgctggc

SEQ ID NO: 127755 - DNA, 38 bp, Artificial Sequence
  primer
gtaaaacgacggccagtgccagactgggttatggagag

SEQ ID NO: 127756 - DNA, 21 bp, Artificial Sequence
  primer
atagccaacgaaatggtggac

SEQ ID NO: 127757 - DNA, 38 bp, Artificial Sequence
  primer
gtaaaacgacggccagttcccaaatccttaactccagg

SEQ ID NO: 127758 - DNA, 38 bp, Artificial Sequence
  primer
gtaaaacgacggccagtattcaacggcataaggagagg

SEQ ID NO: 127759 - DNA, 38 bp, Artificial Sequence
  primer
gtaaaacgacggccagtaaactgggttgcaggagtgtc

SEQ ID NO: 127760 - DNA, 21 bp, Artificial Sequence
  primer
gtctggtgacttggaggaagg

SEQ ID NO: 127761 - DNA, 39 bp, Artificial Sequence
  primer
gtaaaacgacggccagttctgcataggctgaatggtatc

SEQ ID NO: 127762 - DNA, 43 bp, Artificial Sequence
  primer
gtaaaacgacggccagtaacatcacgaaatagtcttgacaaag

SEQ ID NO: 127763 - DNA, 20 bp, Artificial Sequence
  primer
gggcaataaggaatgggaag

SEQ ID NO: 127764 - DNA, 25 bp, Artificial Sequence
  primer
gccacagtagtaggaatttatggtg

SEQ ID NO: 127765 - DNA, 26 bp, Artificial Sequence
  primer
tttgtcagtagttcttaggtcccttc

SEQ ID NO: 127766 - DNA, 25 bp, Artificial Sequence
  primer
ttggcaatctgtctataaaccaaac

SEQ ID NO: 127767 - DNA, 41 bp, Artificial Sequence
  primer
gtaaaacgacggccagtactgcaatactttgctgataccac

SEQ ID NO: 127768 - DNA, 38 bp, Artificial Sequence
  primer
gtaaaacgacggccagtgggctttggatcatgtctctc

SEQ ID NO: 127769 - DNA, 41 bp, Artificial Sequence
  primer
gtaaaacgacggccagtctgttccacatttaatctgtttgg

SEQ ID NO: 127770 - DNA, 21 bp, Artificial Sequence
  primer
tcacattataaggcccgacag

SEQ ID NO: 127771 - DNA, 39 bp, Artificial Sequence
  primer
gtaaaacgacggccagtaataaatgtttgcacagcttgg

SEQ ID NO: 127772 - DNA, 38 bp, Artificial Sequence
  primer
gtaaaacgacggccagttagcaaagctggatgtgaagg

SEQ ID NO: 127773 - DNA, 38 bp, Artificial Sequence
  primer
gtaaaacgacggccagtctgcttgcatctctttcatgc

SEQ ID NO: 127774 - DNA, 40 bp, Artificial Sequence
  primer
gtaaaacgacggccagtgctaaccattctcatgggataca

SEQ ID NO: 127775 - DNA, 39 bp, Artificial Sequence
  primer
gtaaaacgacggccagtttcagctttataggctgcaagg

SEQ ID NO: 127776 - DNA, 42 bp, Artificial Sequence
  primer
gtaaaacgacggccagttttatgcagtcaaatatagctgaaa

SEQ ID NO: 127777 - DNA, 23 bp, Artificial Sequence
  primer
ttcacaactcaggtttcaattcc

SEQ ID NO: 127778 - DNA, 38 bp, Artificial Sequence
  primer
gtaaaacgacggccagttcaaagggtttgtgtttgagg

SEQ ID NO: 127779 - DNA, 21 bp, Artificial Sequence
  primer
tgctccagaaacaccagacac

SEQ ID NO: 127780 - DNA, 21 bp, Artificial Sequence
  primer
aacaatgaaggtttgtgggaa

SEQ ID NO: 127781 - DNA, 43 bp, Artificial Sequence
  primer
gtaaaacgacggccagtaatttgtgacctaatttcaagattcc

SEQ ID NO: 127782 - DNA, 43 bp, Artificial Sequence
  primer
gtaaaacgacggccagtgaaagaatacacatttcaggtcaatg

SEQ ID NO: 127783 - DNA, 36 bp, Artificial Sequence
  primer
gtaaaacgacggccagtgagagggtggcctctttgg

SEQ ID NO: 127784 - DNA, 19 bp, Artificial Sequence
  primer
ggctggctttcttggtcag

SEQ ID NO: 127785 - DNA, 44 bp, Artificial Sequence
  primer
gtaaaacgacggccagttttagcttccattatgttagtatgggt

SEQ ID NO: 127786 - DNA, 38 bp, Artificial Sequence
  primer
gtaaaacgacggccagtagcaagagcaagaaccattca

SEQ ID NO: 127787 - DNA, 42 bp, Artificial Sequence
  primer
gtaaaacgacggccagtttccacaaattcttaggtgtagagc

SEQ ID NO: 127788 - DNA, 38 bp, Artificial Sequence
  primer
gtaaaacgacggccagtgtgactgggttggtatgacgg

SEQ ID NO: 127789 - DNA, 22 bp, Artificial Sequence
  primer
gagctgatcttgaagtgatggc

SEQ ID NO: 127790 - DNA, 38 bp, Artificial Sequence
  primer
gtaaaacgacggccagtgaaacaatgaaagcctcgctc

SEQ ID NO: 127791 - DNA, 37 bp, Artificial Sequence
  primer
gtaaaacgacggccagtccttcacctggcagattcac

SEQ ID NO: 127792 - DNA, 38 bp, Artificial Sequence
  primer
gtaaaacgacggccagttagccacgtgtgaaccgttag

SEQ ID NO: 127793 - DNA, 20 bp, Artificial Sequence
  primer
tcacttactggccatccctg

SEQ ID NO: 127794 - DNA, 20 bp, Artificial Sequence
  primer
ctggagaggtgttcagtgcc

SEQ ID NO: 127795 - DNA, 21 bp, Artificial Sequence
  primer
ttatctgaaaccctgcaagcc

SEQ ID NO: 127796 - DNA, 21 bp, Artificial Sequence
  primer
gggctctttcctccttcctac

SEQ ID NO: 127797 - DNA, 37 bp, Artificial Sequence
  primer
gtaaaacgacggccagtatttcctccattctgcctgg

SEQ ID NO: 127798 - DNA, 21 bp, Artificial Sequence
  primer
gcctatacaagtcatgctggg

SEQ ID NO: 127799 - DNA, 21 bp, Artificial Sequence
  primer
tgggatatgtagggacccatc

SEQ ID NO: 127800 - DNA, 20 bp, Artificial Sequence
  primer
agcaagtagggagctgaggc

SEQ ID NO: 127801 - DNA, 20 bp, Artificial Sequence
  primer
cacgagaatggtgtgaaccc

SEQ ID NO: 127802 - DNA, 37 bp, Artificial Sequence
  primer
gtaaaacgacggccagtaccagttggaatgatcgtgg

SEQ ID NO: 127803 - DNA, 21 bp, Artificial Sequence
  primer
ctttgcagggacattcagttg

SEQ ID NO: 127804 - DNA, 21 bp, Artificial Sequence
  primer
tgtcagggctggcatttattc

SEQ ID NO: 127805 - DNA, 21 bp, Artificial Sequence
  primer
acaggaagctgtcatgtttgg

SEQ ID NO: 127806 - DNA, 21 bp, Artificial Sequence
  primer
gcaagctcaaggtccagtttc

SEQ ID NO: 127807 - DNA, 21 bp, Artificial Sequence
  primer
tgatgcctattcacccatttg

SEQ ID NO: 127808 - DNA, 21 bp, Artificial Sequence
  primer
tgaactgcctgtcatcacctc

SEQ ID NO: 127809 - DNA, 21 bp, Artificial Sequence
  primer
tcctgaaatagggcttagggc

SEQ ID NO: 127810 - DNA, 38 bp, Artificial Sequence
  primer
gtaaaacgacggccagtgggagactggaattcatgacc

SEQ ID NO: 127811 - DNA, 22 bp, Artificial Sequence
  primer
aatttggaatttctcaggaggg

SEQ ID NO: 127812 - DNA, 39 bp, Artificial Sequence
  primer
gtaaaacgacggccagttccttgactccatgcttagctc

SEQ ID NO: 127813 - DNA, 35 bp, Artificial Sequence
  primer
gtaaaacgacggccagtcgcggaggcagaaatcac

SEQ ID NO: 127814 - DNA, 38 bp, Artificial Sequence
  primer
gtaaaacgacggccagtttcagacttctgcactccagc

SEQ ID NO: 127815 - DNA, 38 bp, Artificial Sequence
  primer
gtaaaacgacggccagtaggccaggagaagaggagttg

SEQ ID NO: 127816 - DNA, 38 bp, Artificial Sequence
  primer
gtaaaacgacggccagtcaaggagagatgagcaccacc

SEQ ID NO: 127817 - DNA, 21 bp, Artificial Sequence
  primer
ggcaccaacaccacagataag

SEQ ID NO: 127818 - DNA, 38 bp, Artificial Sequence
  primer
gtaaaacgacggccagtggtccctggtcctggagtatc

SEQ ID NO: 127819 - DNA, 38 bp, Artificial Sequence
  primer
gtaaaacgacggccagtctgaagagcccactcttctcc

SEQ ID NO: 127820 - DNA, 21 bp, Artificial Sequence
  primer
ggacacacacatttccaggag

SEQ ID NO: 127821 - DNA, 38 bp, Artificial Sequence
  primer
gtaaaacgacggccagtggatgcctggtgaagaaagac

SEQ ID NO: 127822 - DNA, 22 bp, Artificial Sequence
  primer
gaagatccagctgtagcagagg

SEQ ID NO: 127823 - DNA, 21 bp, Artificial Sequence
  primer
gatccacaggaagtggaggag

SEQ ID NO: 127824 - DNA, 21 bp, Artificial Sequence
  primer
cagcaatgtttctgaacagcc

SEQ ID NO: 127825 - DNA, 38 bp, Artificial Sequence
  primer
gtaaaacgacggccagtcttgaaacactcccatctccc

SEQ ID NO: 127826 - DNA, 38 bp, Artificial Sequence
  primer
gtaaaacgacggccagtctcccgagtttcagaggtgag

SEQ ID NO: 127827 - DNA, 19 bp, Artificial Sequence
  primer
caggatcatctggcccttc

SEQ ID NO: 127828 - DNA, 21 bp, Artificial Sequence
  primer
gctgtgtctcactaacagccc

SEQ ID NO: 127829 - DNA, 40 bp, Artificial Sequence
  primer
gtaaaacgacggccagtcacagtaaattgtcactggtggg

SEQ ID NO: 127830 - DNA, 38 bp, Artificial Sequence
  primer
gtaaaacgacggccagttctttgatggaggccaaagtc

SEQ ID NO: 127831 - DNA, 38 bp, Artificial Sequence
  primer
gtaaaacgacggccagtagaagagggatgaggctttcc

SEQ ID NO: 127832 - DNA, 38 bp, Artificial Sequence
  primer
gtaaaacgacggccagtttacatgtccctccttccacc

SEQ ID NO: 127833 - DNA, 38 bp, Artificial Sequence
  primer
gtaaaacgacggccagtagaaagtccacagggaaggag

SEQ ID NO: 127834 - DNA, 22 bp, Artificial Sequence
  primer
tgctttcacaaggtaccaagac

SEQ ID NO: 127835 - DNA, 19 bp, Artificial Sequence
  primer
agcatacggagaacgctgg

SEQ ID NO: 127836 - DNA, 37 bp, Artificial Sequence
  primer
gtaaaacgacggccagtctcctcctctcccacagttg

SEQ ID NO: 127837 - DNA, 21 bp, Artificial Sequence
  primer
taccacaaatacaacggcagc

SEQ ID NO: 127838 - DNA, 20 bp, Artificial Sequence
  primer
ctccctgaatgcaagtgagc

SEQ ID NO: 127839 - DNA, 38 bp, Artificial Sequence
  primer
gtaaaacgacggccagttagccttgggacatacacagc

SEQ ID NO: 127840 - DNA, 21 bp, Artificial Sequence
  primer
ctcatcctgaccaaggcctac

SEQ ID NO: 127841 - DNA, 37 bp, Artificial Sequence
  primer
gtaaaacgacggccagtaaagacttcagggcagcatc

SEQ ID NO: 127842 - DNA, 39 bp, Artificial Sequence
  primer
gtaaaacgacggccagtagctccgtttacaaagtggaag

SEQ ID NO: 127843 - DNA, 38 bp, Artificial Sequence
  primer
gtaaaacgacggccagtattgcgatttccatctctgtc

SEQ ID NO: 127844 - DNA, 21 bp, Artificial Sequence
  primer
tccagtgttgctgatgaaagg

SEQ ID NO: 127845 - DNA, 19 bp, Artificial Sequence
  primer
gccgacaagagcgaaactc

SEQ ID NO: 127846 - DNA, 37 bp, Artificial Sequence
  primer
gtaaaacgacggccagtagtttccatgccatcactgg

SEQ ID NO: 127847 - DNA, 21 bp, Artificial Sequence
  primer
ggagaggccaaacataaggtc

SEQ ID NO: 127848 - DNA, 43 bp, Artificial Sequence
  primer
gtaaaacgacggccagtaagtctgcttctttggatgttagttc

SEQ ID NO: 127849 - DNA, 20 bp, Artificial Sequence
  primer
ttccaagacacctgaatggg

SEQ ID NO: 127850 - DNA, 39 bp, Artificial Sequence
  primer
gtaaaacgacggccagttctgctgtcaacctgattcttg

SEQ ID NO: 127851 - DNA, 38 bp, Artificial Sequence
  primer
gtaaaacgacggccagttagcatccagtgtgtccagtg

SEQ ID NO: 127852 - DNA, 38 bp, Artificial Sequence
  primer
gtaaaacgacggccagtttagctgtccatccttctggg

SEQ ID NO: 127853 - DNA, 37 bp, Artificial Sequence
  primer
gtaaaacgacggccagtctaaggctgaagaccgtggg

SEQ ID NO: 127854 - DNA, 37 bp, Artificial Sequence
  primer
gtaaaacgacggccagtgactcaggagtcagggccag

SEQ ID NO: 127855 - DNA, 38 bp, Artificial Sequence
  primer
gtaaaacgacggccagtcctgatgtccagaattccctc

SEQ ID NO: 127856 - DNA, 21 bp, Artificial Sequence
  primer
gtgtctctcaccaacaggcag

SEQ ID NO: 127857 - DNA, 38 bp, Artificial Sequence
  primer
gtaaaacgacggccagtgtggagctgaacccaagaatc

SEQ ID NO: 127858 - DNA, 38 bp, Artificial Sequence
  primer
gtaaaacgacggccagtacatgaagtccaagcggaaac

SEQ ID NO: 127859 - DNA, 20 bp, Artificial Sequence
  primer
ctgcccagcctatagccatc

SEQ ID NO: 127860 - DNA, 20 bp, Artificial Sequence
  primer
gttgtcccacctgtgtcctg

SEQ ID NO: 127861 - DNA, 37 bp, Artificial Sequence
  primer
gtaaaacgacggccagtagtgccctcctcctcgtaag

SEQ ID NO: 127862 - DNA, 21 bp, Artificial Sequence
  primer
gatgcctctgtacccttggac

SEQ ID NO: 127863 - DNA, 22 bp, Artificial Sequence
  primer
aatccttaggtcagggcttctg

SEQ ID NO: 127864 - DNA, 41 bp, Artificial Sequence
  primer
gtaaaacgacggccagtcaattctgggattctagagtcagg

SEQ ID NO: 127865 - DNA, 38 bp, Artificial Sequence
  primer
gtaaaacgacggccagtaccacagttcctgagtggctc

SEQ ID NO: 127866 - DNA, 22 bp, Artificial Sequence
  primer
aaaggaggacagtcagctaccc

SEQ ID NO: 127867 - DNA, 38 bp, Artificial Sequence
  primer
gtaaaacgacggccagtaaagggcagctagaaggactg

SEQ ID NO: 127868 - DNA, 21 bp, Artificial Sequence
  primer
tctgtggtgtgtgggtagtga

SEQ ID NO: 127869 - DNA, 21 bp, Artificial Sequence
  primer
cttgaccagacttccaaaccc

SEQ ID NO: 127870 - DNA, 38 bp, Artificial Sequence
  primer
gtaaaacgacggccagtcagacaattggcaccttgaac

SEQ ID NO: 127871 - DNA, 21 bp, Artificial Sequence
  primer
aggcccagagaccctgtagtg

SEQ ID NO: 127872 - DNA, 38 bp, Artificial Sequence
  primer
gtaaaacgacggccagtagctctctgcagcaactaggg

SEQ ID NO: 127873 - DNA, 22 bp, Artificial Sequence
  primer
cgtcacttcacctgtcatgttc

SEQ ID NO: 127874 - DNA, 38 bp, Artificial Sequence
  primer
gtaaaacgacggccagtcaggactacaactcccagcag

SEQ ID NO: 127875 - DNA, 38 bp, Artificial Sequence
  primer
gtaaaacgacggccagtacagcatttggatgagtcacg

SEQ ID NO: 127876 - DNA, 21 bp, Artificial Sequence
  primer
caggaacaatgcatgaaacag

SEQ ID NO: 127877 - DNA, 21 bp, Artificial Sequence
  primer
caggctgaggttaagaaaggg

SEQ ID NO: 127878 - DNA, 20 bp, Artificial Sequence
  primer
gcttaagcacacagtgcagc

SEQ ID NO: 127879 - DNA, 18 bp, Artificial Sequence
  primer
gggctccgaatcctggtc

SEQ ID NO: 127880 - DNA, 37 bp, Artificial Sequence
  primer
gtaaaacgacggccagtgttcatctgcctcctgcctc

SEQ ID NO: 127881 - DNA, 21 bp, Artificial Sequence
  primer
tgatctctgacctctggtgcc

SEQ ID NO: 127882 - DNA, 38 bp, Artificial Sequence
  primer
gtaaaacgacggccagtcagagcccattagccactttc

SEQ ID NO: 127883 - DNA, 21 bp, Artificial Sequence
  primer
agcttggctcagaatagctgg

SEQ ID NO: 127884 - DNA, 38 bp, Artificial Sequence
  primer
gtaaaacgacggccagtcaggaagttgtgttcctccag

SEQ ID NO: 127885 - DNA, 21 bp, Artificial Sequence
  primer
gagtcagctgcctggtctttc

SEQ ID NO: 127886 - DNA, 21 bp, Artificial Sequence
  primer
tgacagtgaaacgctcgtagg

SEQ ID NO: 127887 - DNA, 37 bp, Artificial Sequence
  primer
gtaaaacgacggccagtacaagtcgcctcctgtgatg

SEQ ID NO: 127888 - DNA, 38 bp, Artificial Sequence
  primer
gtaaaacgacggccagtaaatctaagggtcctgcctcc

SEQ ID NO: 127889 - DNA, 37 bp, Artificial Sequence
  primer
gtaaaacgacggccagtagacaacacagccttgtccg

SEQ ID NO: 127890 - DNA, 21 bp, Artificial Sequence
  primer
cagacacaagacaggcagctc

SEQ ID NO: 127891 - DNA, 34 bp, Artificial Sequence
  primer
gtaaaacgacggccagtactctggggacgggagg

SEQ ID NO: 127892 - DNA, 38 bp, Artificial Sequence
  primer
gtaaaacgacggccagttgacgtgagttctctcccttg

SEQ ID NO: 127893 - DNA, 38 bp, Artificial Sequence
  primer
gtaaaacgacggccagtgttctgggtgaattgggtgac

SEQ ID NO: 127894 - DNA, 21 bp, Artificial Sequence
  primer
attcagaaaccgcttctcacc

SEQ ID NO: 127895 - DNA, 21 bp, Artificial Sequence
  primer
tgggaggactctcacaaccta

SEQ ID NO: 127896 - DNA, 39 bp, Artificial Sequence
  primer
gtaaaacgacggccagtggcaaacttgagatttcagtgc

SEQ ID NO: 127897 - DNA, 38 bp, Artificial Sequence
  primer
gtaaaacgacggccagtaaacggatcaatcggaaagtg

SEQ ID NO: 127898 - DNA, 21 bp, Artificial Sequence
  primer
ttgaagccaatttgcagaaag

SEQ ID NO: 127899 - DNA, 21 bp, Artificial Sequence
  primer
ttccctccggtgacagtttac

SEQ ID NO: 127900 - DNA, 39 bp, Artificial Sequence
  primer
gtaaaacgacggccagttggtctcattaccctgaacctg

SEQ ID NO: 127901 - DNA, 22 bp, Artificial Sequence
  primer
cagctcaacaaccaacactgtc

SEQ ID NO: 127902 - DNA, 21 bp, Artificial Sequence
  primer
gaagtggcatcaaatccacag

SEQ ID NO: 127903 - DNA, 38 bp, Artificial Sequence
  primer
gtaaaacgacggccagtccgaagccaatggatagagtc

SEQ ID NO: 127904 - DNA, 38 bp, Artificial Sequence
  primer
gtaaaacgacggccagtgccaaaggatcgtatctggag

SEQ ID NO: 127905 - DNA, 38 bp, Artificial Sequence
  primer
gtaaaacgacggccagtcatgccacaaccatctttcag

SEQ ID NO: 127906 - DNA, 39 bp, Artificial Sequence
  primer
gtaaaacgacggccagtcgtgctttcctccttgatactc

SEQ ID NO: 127907 - DNA, 21 bp, Artificial Sequence
  primer
ggttgtctgtggccatgttag

SEQ ID NO: 127908 - DNA, 21 bp, Artificial Sequence
  primer
gatcctttacgctccgatgag

SEQ ID NO: 127909 - DNA, 21 bp, Artificial Sequence
  primer
ttgctgcttaatttggctgtg

SEQ ID NO: 127910 - DNA, 38 bp, Artificial Sequence
  primer
gtaaaacgacggccagtttaagaaaccttccgggtgag

SEQ ID NO: 127911 - DNA, 38 bp, Artificial Sequence
  primer
gtaaaacgacggccagtaccttcctcctagttgctggg

SEQ ID NO: 127912 - DNA, 38 bp, Artificial Sequence
  primer
gtaaaacgacggccagttgcagtggaggtcgaagatag

SEQ ID NO: 127913 - DNA, 39 bp, Artificial Sequence
  primer
gtaaaacgacggccagtgcctactagtcatggcctaccc

SEQ ID NO: 127914 - DNA, 38 bp, Artificial Sequence
  primer
gtaaaacgacggccagtggagtgtcttcggttctaggg

SEQ ID NO: 127915 - DNA, 38 bp, Artificial Sequence
  primer
gtaaaacgacggccagtgtgaaagggtgaagaagccag

SEQ ID NO: 127916 - DNA, 22 bp, Artificial Sequence
  primer
tcatcactgcctgctgtaacac

SEQ ID NO: 127917 - DNA, 23 bp, Artificial Sequence
  primer
ccaggtgactatctttcaagcac

SEQ ID NO: 127918 - DNA, 38 bp, Artificial Sequence
  primer
gtaaaacgacggccagtaaactttcagcagctcatccc

SEQ ID NO: 127919 - DNA, 21 bp, Artificial Sequence
  primer
aagcatgtgctgtatcttggg

SEQ ID NO: 127920 - DNA, 20 bp, Artificial Sequence
  primer
cacttcacccagaacttggc

SEQ ID NO: 127921 - DNA, 21 bp, Artificial Sequence
  primer
aagtgtttgtgctttccctgg

SEQ ID NO: 127922 - DNA, 23 bp, Artificial Sequence
  primer
aaggactggattagttgaccacc

SEQ ID NO: 127923 - DNA, 38 bp, Artificial Sequence
  primer
gtaaaacgacggccagtcctcaagggtcttgaacatgg

SEQ ID NO: 127924 - DNA, 22 bp, Artificial Sequence
  primer
cagtttcatttgtaaggcaggg

SEQ ID NO: 127925 - DNA, 21 bp, Artificial Sequence
  primer
acggacccattacaggacaag

SEQ ID NO: 127926 - DNA, 21 bp, Artificial Sequence
  primer
gcactaatgatgccaagtggg

SEQ ID NO: 127927 - DNA, 21 bp, Artificial Sequence
  primer
cctcacacagccatctgagtc

SEQ ID NO: 127928 - DNA, 38 bp, Artificial Sequence
  primer
gtaaaacgacggccagtggcagaaactcaatcgggtag

SEQ ID NO: 127929 - DNA, 21 bp, Artificial Sequence
  primer
cccggcttgtgagtgttagtc

SEQ ID NO: 127930 - DNA, 38 bp, Artificial Sequence
  primer
gtaaaacgacggccagttgggaacgctagggataagag

SEQ ID NO: 127931 - DNA, 20 bp, Artificial Sequence
  primer
cctccctcctagaggttccc

SEQ ID NO: 127932 - DNA, 21 bp, Artificial Sequence
  primer
ctgactaacgtggctggtgag

SEQ ID NO: 127933 - DNA, 38 bp, Artificial Sequence
  primer
gtaaaacgacggccagtcaagcaccacagtatgccaac

SEQ ID NO: 127934 - DNA, 21 bp, Artificial Sequence
  primer
ccacacacagaccgatgaaac

SEQ ID NO: 127935 - DNA, 38 bp, Artificial Sequence
  primer
gtaaaacgacggccagtctttggctgctttgttctgtg

SEQ ID NO: 127936 - DNA, 39 bp, Artificial Sequence
  primer
gtaaaacgacggccagtcaacaggacaacggaggtaaac

SEQ ID NO: 127937 - DNA, 21 bp, Artificial Sequence
  primer
tggtaattcgtgtctgggttg

SEQ ID NO: 127938 - DNA, 38 bp, Artificial Sequence
  primer
gtaaaacgacggccagtcatcacaggagagtggaaagc

SEQ ID NO: 127939 - DNA, 24 bp, Artificial Sequence
  primer
aactcaaaggagtggttgtgaaag

SEQ ID NO: 127940 - DNA, 22 bp, Artificial Sequence
  primer
catgctaaagtggaacagaccc

SEQ ID NO: 127941 - DNA, 21 bp, Artificial Sequence
  primer
cccaaggaatcttgcactttc

SEQ ID NO: 127942 - DNA, 38 bp, Artificial Sequence
  primer
gtaaaacgacggccagtttatagcaatgtgaggtgggc

SEQ ID NO: 127943 - DNA, 37 bp, Artificial Sequence
  primer
gtaaaacgacggccagttttcaggattgagggcacac

SEQ ID NO: 127944 - DNA, 21 bp, Artificial Sequence
  primer
tcactgccagatcacactctg

SEQ ID NO: 127945 - DNA, 38 bp, Artificial Sequence
  primer
gtaaaacgacggccagtgccaacagagatgaatggaag

SEQ ID NO: 127946 - DNA, 38 bp, Artificial Sequence
  primer
gtaaaacgacggccagtacataggagaggaagaggccc

SEQ ID NO: 127947 - DNA, 38 bp, Artificial Sequence
  primer
gtaaaacgacggccagtggagctggagatcagcgttag

SEQ ID NO: 127948 - DNA, 36 bp, Artificial Sequence
  primer
gtaaaacgacggccagtcagcccttcctgaacttcg

SEQ ID NO: 127949 - DNA, 38 bp, Artificial Sequence
  primer
gtaaaacgacggccagtaaagaaagggaggtgggagag

SEQ ID NO: 127950 - DNA, 23 bp, Artificial Sequence
  primer
gaagattcagacaccaagctcag

SEQ ID NO: 127951 - DNA, 21 bp, Artificial Sequence
  primer
gcagtttccatgttgtcatgc

SEQ ID NO: 127952 - DNA, 22 bp, Artificial Sequence
  primer
gcctataccttgtttggttccc

SEQ ID NO: 127953 - DNA, 42 bp, Artificial Sequence
  primer
gtaaaacgacggccagtcaaacacaatcactgtgcctatatc

SEQ ID NO: 127954 - DNA, 39 bp, Artificial Sequence
  primer
gtaaaacgacggccagtacatgctgtggagaaatcaaag

SEQ ID NO: 127955 - DNA, 22 bp, Artificial Sequence
  primer
ttcaactccaaacaaactggtg

SEQ ID NO: 127956 - DNA, 38 bp, Artificial Sequence
  primer
gtaaaacgacggccagtccaagctggataaatgcactg

SEQ ID NO: 127957 - DNA, 21 bp, Artificial Sequence
  primer
tctcatgacttgggtcccttc

SEQ ID NO: 127958 - DNA, 21 bp, Artificial Sequence
  primer
aatcccagcttctcctcacag

SEQ ID NO: 127959 - DNA, 38 bp, Artificial Sequence
  primer
gtaaaacgacggccagttcagcatgacaccagcttacc

SEQ ID NO: 127960 - DNA, 37 bp, Artificial Sequence
  primer
gtaaaacgacggccagtggcagaatcacctgctatgc

SEQ ID NO: 127961 - DNA, 21 bp, Artificial Sequence
  primer
tgctataacgaggcagactgg

SEQ ID NO: 127962 - DNA, 38 bp, Artificial Sequence
  primer
gtaaaacgacggccagtcacaaacccaaacaaacgaac

SEQ ID NO: 127963 - DNA, 23 bp, Artificial Sequence
  primer
tgctattcaagtggttaggtgtg

SEQ ID NO: 127964 - DNA, 26 bp, Artificial Sequence
  primer
actgaaagaattcatcttatccacac

SEQ ID NO: 127965 - DNA, 21 bp, Artificial Sequence
  primer
acttgagcctgggagtttgag

SEQ ID NO: 127966 - DNA, 24 bp, Artificial Sequence
  primer
cccaggttcttacaaagttaagcc

SEQ ID NO: 127967 - DNA, 39 bp, Artificial Sequence
  primer
gtaaaacgacggccagtcgctgacacctgagtaaagacc

SEQ ID NO: 127968 - DNA, 39 bp, Artificial Sequence
  primer
gtaaaacgacggccagtgctagctgtttggtgaacaagg

SEQ ID NO: 127969 - DNA, 21 bp, Artificial Sequence
  primer
acaggaatgaatgactgcacc

SEQ ID NO: 127970 - DNA, 21 bp, Artificial Sequence
  primer
tgagggttggactgacttgag

SEQ ID NO: 127971 - DNA, 23 bp, Artificial Sequence
  primer
ccataacccagtttgttctaccc

SEQ ID NO: 127972 - DNA, 21 bp, Artificial Sequence
  primer
aaggccacttggctttactcc

SEQ ID NO: 127973 - DNA, 37 bp, Artificial Sequence
  primer
gtaaaacgacggccagtgatcctcccaccttggtctc

SEQ ID NO: 127974 - DNA, 24 bp, Artificial Sequence
  primer
aaacagcagtatgttaacagtggc

SEQ ID NO: 127975 - DNA, 20 bp, Artificial Sequence
  primer
cctgcgtcatcactggagtc

SEQ ID NO: 127976 - DNA, 38 bp, Artificial Sequence
  primer
gtaaaacgacggccagtgctaggctcaagcaatctccc

SEQ ID NO: 127977 - DNA, 35 bp, Artificial Sequence; identical to SEQ ID NO: 13122
  primer

SEQ ID NO: 127978 - DNA, 20 bp, Artificial Sequence
  primer
acaggaggaccgttctgagg

SEQ ID NO: 127979 - DNA, 41 bp, Artificial Sequence
  primer
gtaaaacgacggccagtgctgtttgataaatctagatgcgg

SEQ ID NO: 127980 - DNA, 21 bp, Artificial Sequence
  primer
tgaagagtgattcctcaaccc

SEQ ID NO: 127981 - DNA, 39 bp, Artificial Sequence
  primer
gtaaaacgacggccagtccgccaaagtaaatctagcaac

SEQ ID NO: 127982 - DNA, 22 bp, Artificial Sequence
  primer
tgaactaacatgagtgaagggc

SEQ ID NO: 127983 - DNA, 21 bp, Artificial Sequence
  primer
agttgaatggagcctcagagc

SEQ ID NO: 127984 - DNA, 38 bp, Artificial Sequence
  primer
gtaaaacgacggccagtagttgaatggagcctcagagc

SEQ ID NO: 127985 - DNA, 25 bp, Artificial Sequence
  primer
tccactagggagggtatttacagag

SEQ ID NO: 127986 - DNA, 38 bp, Artificial Sequence
  primer
gtaaaacgacggccagtgaacagggaggaagttggttc

SEQ ID NO: 127987 - DNA, 21 bp, Artificial Sequence
  primer
ctcataagggcagagactccc

SEQ ID NO: 127988 - DNA, 41 bp, Artificial Sequence
  primer
gtaaaacgacggccagttggagaagaccttaacaagtcaca

SEQ ID NO: 127989 - DNA, 39 bp, Artificial Sequence
  primer
gtaaaacgacggccagttgtgaccactccagatcaactc

SEQ ID NO: 127990 - DNA, 40 bp, Artificial Sequence
  primer
gtaaaacgacggccagttgactcttcattgcatgtgtttg

SEQ ID NO: 127991 - DNA, 44 bp, Artificial Sequence
  primer
gtaaaacgacggccagttggatataaagtacattcctgcaattc

SEQ ID NO: 127992 - DNA, 38 bp, Artificial Sequence
  primer
gtaaaacgacggccagttggctattcccagaatgactg

SEQ ID NO: 127993 - DNA, 43 bp, Artificial Sequence
  primer
gtaaaacgacggccagtaaagaatcataagggtgttcaatgta

SEQ ID NO: 127994 - DNA, 38 bp, Artificial Sequence
  primer
gtaaaacgacggccagttcctattccaccatccattcc

SEQ ID NO: 127995 - DNA, 38 bp, Artificial Sequence
  primer
gtaaaacgacggccagtttagtccataagggcacaggg

SEQ ID NO: 127996 - DNA, 38 bp, Artificial Sequence
  primer
gtaaaacgacggccagtcaaattctcagcgaaagaccc

SEQ ID NO: 127997 - DNA, 38 bp, Artificial Sequence
  primer
gtaaaacgacggccagtttagaaagtgggtgccatctg

SEQ ID NO: 127998 - DNA, 21 bp, Artificial Sequence
  primer
ctctgcaggaagaagaccagg

SEQ ID NO: 127999 - DNA, 21 bp, Artificial Sequence
  primer
gcagcacctggtagttgaagg

SEQ ID NO: 128000 - DNA, 37 bp, Artificial Sequence
  primer
gtaaaacgacggccagtagcctacctccatctccgtg

SEQ ID NO: 128001 - DNA, 22 bp, Artificial Sequence
  primer
ttcttgtcctccactgagatcc

SEQ ID NO: 128002 - DNA, 38 bp, Artificial Sequence
  primer
gtaaaacgacggccagtccggcacatagtactccacag

SEQ ID NO: 128003 - DNA, 37 bp, Artificial Sequence
  primer
gtaaaacgacggccagtcccacttggagacaacatgc

SEQ ID NO: 128004 - DNA, 36 bp, Artificial Sequence
  primer
gtaaaacgacggccagtctcaggcagacgtgcattc

SEQ ID NO: 128005 - DNA, 40 bp, Artificial Sequence
  primer
gtaaaacgacggccagtaggaaatatcatgaatgccaatg

SEQ ID NO: 128006 - DNA, 25 bp, Artificial Sequence
  primer
gagaaatagggtttcaaagagttgc

SEQ ID NO: 128007 - DNA, 21 bp, Artificial Sequence
  primer
atactttgcaattgtgccacg

SEQ ID NO: 128008 - DNA, 40 bp, Artificial Sequence
  primer
gtaaaacgacggccagttgctttaaacctacaaccaaggg

SEQ ID NO: 128009 - DNA, 21 bp, Artificial Sequence
  primer
ctaatcctcagggctgctcac

SEQ ID NO: 128010 - DNA, 23 bp, Artificial Sequence
  primer
tgctttcaatggatatttgttgc

SEQ ID NO: 128011 - DNA, 44 bp, Artificial Sequence
  primer
gtaaaacgacggccagtgaataaacagttatagagctctcaggg

SEQ ID NO: 128012 - DNA, 21 bp, Artificial Sequence
  primer
tttgcctttcttcctccaaac

SEQ ID NO: 128013 - DNA, 21 bp, Artificial Sequence
  primer
gatgcaacaaatagcaggtgg

SEQ ID NO: 128014 - DNA, 25 bp, Artificial Sequence
  primer
tcaatatcagaaagatgaaagcaca

SEQ ID NO: 128015 - DNA, 22 bp, Artificial Sequence
  primer
ttgctgacagatgggatttatg

SEQ ID NO: 128016 - DNA, 41 bp, Artificial Sequence
  primer
gtaaaacgacggccagttttggtttatccttgaactggaaa

SEQ ID NO: 128017 - DNA, 18 bp, Artificial Sequence
  primer
caacaggcagcgaaggtg

SEQ ID NO: 128018 - DNA, 38 bp, Artificial Sequence
  primer
gtaaaacgacggccagttgcagatatccaatccacctg

SEQ ID NO: 128019 - DNA, 21 bp, Artificial Sequence
  primer
aacctctgcctccacactgag

SEQ ID NO: 128020 - DNA, 21 bp, Artificial Sequence
  primer
cccaaagccaaggtctaacag

SEQ ID NO: 128021 - DNA, 21 bp, Artificial Sequence
  primer
tcaatcctgggtgacagtgag

SEQ ID NO: 128022 - DNA, 38 bp, Artificial Sequence
  primer
gtaaaacgacggccagtacatgaagcaatgtccctgac

SEQ ID NO: 128023 - DNA, 38 bp, Artificial Sequence
  primer
gtaaaacgacggccagtcccagacacctctgtgttcaa

SEQ ID NO: 128024 - DNA, 21 bp, Artificial Sequence
  primer
attccttccatgctgaaatgc

SEQ ID NO: 128025 - DNA, 38 bp, Artificial Sequence
  primer
gtaaaacgacggccagttaagagcaggctttgatgcag

SEQ ID NO: 128026 - DNA, 38 bp, Artificial Sequence
  primer
gtaaaacgacggccagttgactgagcaaagatgccttc

SEQ ID NO: 128027 - DNA, 38 bp, Artificial Sequence
  primer
gtaaaacgacggccagtcttgtccttcctccctgaaac

SEQ ID NO: 128028 - DNA, 38 bp, Artificial Sequence
  primer
gtaaaacgacggccagtcgggagaaagatctggaaatg

SEQ ID NO: 128029 - DNA, 38 bp, Artificial Sequence
  primer
gtaaaacgacggccagtgttgtgtgcagctgctgtttc

SEQ ID NO: 128030 - DNA, 23 bp, Artificial Sequence
  primer
ttcctgactgtaccctccctaac

SEQ ID NO: 128031 - DNA, 21 bp, Artificial Sequence
  primer
actgtttgcgctatttcctcc

SEQ ID NO: 128032 - DNA, 22 bp, Artificial Sequence
  primer
catgtccagcaaattgtcacac

SEQ ID NO: 128033 - DNA, 21 bp, Artificial Sequence
  primer
atctgaggaacaagcatgtgg

SEQ ID NO: 128034 - DNA, 38 bp, Artificial Sequence
  primer
gtaaaacgacggccagtcaggagtgatgagcaaacacc

SEQ ID NO: 128035 - DNA, 21 bp, Artificial Sequence
  primer
acttcatgctggtaatccctg

SEQ ID NO: 128036 - DNA, 21 bp, Artificial Sequence
  primer
tcgccacttacaaggacaaag

SEQ ID NO: 128037 - DNA, 38 bp, Artificial Sequence
  primer
gtaaaacgacggccagtggatggctttgtttccagaag

SEQ ID NO: 128038 - DNA, 38 bp, Artificial Sequence
  primer
gtaaaacgacggccagtgcacatgaagattcaagaggg

SEQ ID NO: 128039 - DNA, 38 bp, Artificial Sequence
  primer
gtaaaacgacggccagtctaacctcacgatccacctgc

SEQ ID NO: 128040 - DNA, 21 bp, Artificial Sequence
  primer
acagtggctgagatccatttg

SEQ ID NO: 128041 - DNA, 24 bp, Artificial Sequence
  primer
cgctttattagtgaaagcagtgtg

SEQ ID NO: 128042 - DNA, 21 bp, Artificial Sequence
  primer
ccaaagtaccaccagtgcaag

SEQ ID NO: 128043 - DNA, 38 bp, Artificial Sequence
  primer
gtaaaacgacggccagtaaactcccatctgcagtgacc

SEQ ID NO: 128044 - DNA, 38 bp, Artificial Sequence
  primer
gtaaaacgacggccagttagacttcggagtttcctgcc

SEQ ID NO: 128045 - DNA, 38 bp, Artificial Sequence
  primer
gtaaaacgacggccagttcccatgcactcaaatagacg

SEQ ID NO: 128046 - DNA, 38 bp, Artificial Sequence
  primer
gtaaaacgacggccagtttccatgaaagggcttctagc

SEQ ID NO: 128047 - DNA, 38 bp, Artificial Sequence
  primer
gtaaaacgacggccagtttgctgggtactacaacctgc

SEQ ID NO: 128048 - DNA, 38 bp, Artificial Sequence
  primer
gtaaaacgacggccagtatctcctgtatgaagctcccg

SEQ ID NO: 128049 - DNA, 38 bp, Artificial Sequence
  primer
gtaaaacgacggccagttacctccattggcacaaactg

SEQ ID NO: 128050 - DNA, 21 bp, Artificial Sequence
  primer
aacaggatgcaaatactgggc

SEQ ID NO: 128051 - DNA, 21 bp, Artificial Sequence
  primer
aactctaaggtccaggcgttg

SEQ ID NO: 128052 - DNA, 22 bp, Artificial Sequence
  primer
ccttgttcagtttcaccctctg

SEQ ID NO: 128053 - DNA, 43 bp, Artificial Sequence
  primer
gtaaaacgacggccagtgatttgctttgtttagatcaagtctg

SEQ ID NO: 128054 - DNA, 21 bp, Artificial Sequence
  primer
aacaaagcccatttgctcttc

SEQ ID NO: 128055 - DNA, 26 bp, Artificial Sequence
  primer
tcacatcactgtcacaaacttgatag

SEQ ID NO: 128056 - DNA, 21 bp, Artificial Sequence
  primer
ctaccggctagactcaaaggg

SEQ ID NO: 128057 - DNA, 40 bp, Artificial Sequence
  primer
gtaaaacgacggccagttttgaaacgcaaatgaaactctc

SEQ ID NO: 128058 - DNA, 38 bp, Artificial Sequence
  primer
gtaaaacgacggccagtctggttaactctctggcctcc

SEQ ID NO: 128059 - DNA, 42 bp, Artificial Sequence
  primer
gtaaaacgacggccagtggctctttaagaaagttgtcaacac

SEQ ID NO: 128060 - DNA, 39 bp, Artificial Sequence
  primer
gtaaaacgacggccagtctgaccctatttgtgtgcagag

SEQ ID NO: 128061 - DNA, 22 bp, Artificial Sequence
  primer
ggctgtttaaagagtttgctgg

SEQ ID NO: 128062 - DNA, 21 bp, Artificial Sequence
  primer
agtactaaccatgggcttcgc

SEQ ID NO: 128063 - DNA, 37 bp, Artificial Sequence
  primer
gtaaaacgacggccagtctcaagtggtcctctcctgc

SEQ ID NO: 128064 - DNA, 41 bp, Artificial Sequence
  primer
gtaaaacgacggccagtttcagacttcacaggaacacaaac

SEQ ID NO: 128065 - DNA, 21 bp, Artificial Sequence
  primer
attctgaccctcctgcctttc

SEQ ID NO: 128066 - DNA, 23 bp, Artificial Sequence
  primer
ttcacaactgacaatggttgttc

SEQ ID NO: 128067 - DNA, 19 bp, Artificial Sequence
  primer
ctctgcccgaggagttgtc

SEQ ID NO: 128068 - DNA, 21 bp, Artificial Sequence
  primer
agctgccttcaaggatctcac

SEQ ID NO: 128069 - DNA, 37 bp, Artificial Sequence
  primer
gtaaaacgacggccagtcaggaccagctcctttcagg

SEQ ID NO: 128070 - DNA, 26 bp, Artificial Sequence
  primer
tcctatctctctctcagtttcatttg

SEQ ID NO: 128071 - DNA, 38 bp, Artificial Sequence
  primer
gtaaaacgacggccagtgcactcagttccaaatccaaa

SEQ ID NO: 128072 - DNA, 26 bp, Artificial Sequence
  primer
tttggacatcaatattctgacctatg

SEQ ID NO: 128073 - DNA, 39 bp, Artificial Sequence
  primer
gtaaaacgacggccagtcatgctaccctacttcctccaa

SEQ ID NO: 128074 - DNA, 38 bp, Artificial Sequence
  primer
gtaaaacgacggccagttatgaaccacaccgagcattt

SEQ ID NO: 128075 - DNA, 43 bp, Artificial Sequence
  primer
gtaaaacgacggccagtacataatgaatcaagtctcctactgg

SEQ ID NO: 128076 - DNA, 21 bp, Artificial Sequence
  primer
gcatcgactagagccttgatg

SEQ ID NO: 128077 - DNA, 42 bp, Artificial Sequence
  primer
gtaaaacgacggccagtgcaatgagtaataaggaagaaggaa

SEQ ID NO: 128078 - DNA, 41 bp, Artificial Sequence
  primer
gtaaaacgacggccagtgaacatagctaccatttctcagcc

SEQ ID NO: 128079 - DNA, 38 bp, Artificial Sequence
  primer
gtaaaacgacggccagtttaccagccagtttgtgatcc

SEQ ID NO: 128080 - DNA, 23 bp, Artificial Sequence
  primer
ccgtgcagtatttacaacctttg

SEQ ID NO: 128081 - DNA, 21 bp, Artificial Sequence
  primer
agtgtgcctcttgcatttctg

SEQ ID NO: 128082 - DNA, 37 bp, Artificial Sequence
  primer
gtaaaacgacggccagtgtcagaactcattgcagcgg

SEQ ID NO: 128083 - DNA, 37 bp, Artificial Sequence
  primer
gtaaaacgacggccagtcttccctatgcctagcctgg

SEQ ID NO: 128084 - DNA, 22 bp, Artificial Sequence
  primer
aacacatgaagttgcacaatcc

SEQ ID NO: 128085 - DNA, 20 bp, Artificial Sequence
  primer
tcaagtcctggatgtgctgc

SEQ ID NO: 128086 - DNA, 18 bp, Artificial Sequence
  primer
gtgcaacggcacgatctc

SEQ ID NO: 128087 - DNA, 21 bp, Artificial Sequence
  primer
tcatgtccgaggtaacaggtc

SEQ ID NO: 128088 - DNA, 37 bp, Artificial Sequence
  primer
gtaaaacgacggccagtacaggtggttcctgagaccc

SEQ ID NO: 128089 - DNA, 24 bp, Artificial Sequence
  primer
catactgctttcaagaccttaccc

SEQ ID NO: 128090 - DNA, 40 bp, Artificial Sequence
  primer
gtaaaacgacggccagtaacaaacatctcttctcaatggg

SEQ ID NO: 128091 - DNA, 40 bp, Artificial Sequence
  primer
gtaaaacgacggccagttgtacccagcagagacacatttc

SEQ ID NO: 128092 - DNA, 38 bp, Artificial Sequence
  primer
gtaaaacgacggccagtggaacagagaggaccagaagc

SEQ ID NO: 128093 - DNA, 25 bp, Artificial Sequence
  primer
tgaggtggcatttataaagatgttg

SEQ ID NO: 128094 - DNA, 41 bp, Artificial Sequence
  primer
gtaaaacgacggccagtaggtttgttcaatttaaggtctcc

SEQ ID NO: 128095 - DNA, 37 bp, Artificial Sequence
  primer
gtaaaacgacggccagtagtgctctgggtgatgatgg

SEQ ID NO: 128096 - DNA, 39 bp, Artificial Sequence
  primer
gtaaaacgacggccagtgaggacatcaggatgatcaagg

SEQ ID NO: 128097 - DNA, 38 bp, Artificial Sequence
  primer
gtaaaacgacggccagtcctccctgctgtatcagaacc

SEQ ID NO: 128098 - DNA, 23 bp, Artificial Sequence
  primer
aaggaaacctctgaagaagcaac

SEQ ID NO: 128099 - DNA, 37 bp, Artificial Sequence
  primer
gtaaaacgacggccagtctcccaagccaatctaaccc

SEQ ID NO: 128100 - DNA, 38 bp, Artificial Sequence
  primer
gtaaaacgacggccagtccaagctccttcttgtgaagc

SEQ ID NO: 128101 - DNA, 38 bp, Artificial Sequence
  primer
gtaaaacgacggccagttaaaccacagggatttgaggg

SEQ ID NO: 128102 - DNA, 21 bp, Artificial Sequence
  primer
gagagagaggcatgggttcac

SEQ ID NO: 128103 - DNA, 21 bp, Artificial Sequence
  primer
ataacaggtgttctggacccg

SEQ ID NO: 128104 - DNA, 21 bp, Artificial Sequence
  primer
caagtctgaccttggcatttg

SEQ ID NO: 128105 - DNA, 18 bp, Artificial Sequence
  primer
acctttgaccctgcagcc

SEQ ID NO: 128106 - DNA, 21 bp, Artificial Sequence
  primer
tctcaacgcctctccctagac

SEQ ID NO: 128107 - DNA, 21 bp, Artificial Sequence
  primer
gttatggaccgacaatgcctg

SEQ ID NO: 128108 - DNA, 21 bp, Artificial Sequence
  primer
acataagcatcagccctcctc

SEQ ID NO: 128109 - DNA, 38 bp, Artificial Sequence
  primer
gtaaaacgacggccagtggtcagggattggactctcag

SEQ ID NO: 128110 - DNA, 38 bp, Artificial Sequence
  primer
gtaaaacgacggccagtgggaggatccgtgttggatac

SEQ ID NO: 128111 - DNA, 21 bp, Artificial Sequence
  primer
tgggagacaaagtggactgag

SEQ ID NO: 128112 - DNA, 21 bp, Artificial Sequence
  primer
ccgtcaatatcttggcctcag

SEQ ID NO: 128113 - DNA, 22 bp, Artificial Sequence
  primer
ctgtgctttgaatgtttgttgg

SEQ ID NO: 128114 - DNA, 21 bp, Artificial Sequence
  primer
agctcagtgtctgcccaaatg

SEQ ID NO: 128115 - DNA, 21 bp, Artificial Sequence
  primer
gggaaactgcctaatcaagcc

SEQ ID NO: 128116 - DNA, 19 bp, Artificial Sequence
  primer
aaaggcctgagggtccaag

SEQ ID NO: 128117 - DNA, 21 bp, Artificial Sequence
  primer
cagtgctccacaaatggattg

SEQ ID NO: 128118 - DNA, 21 bp, Artificial Sequence
  primer
tccacaggctttaccaaactg

SEQ ID NO: 128119 - DNA, 40 bp, Artificial Sequence
  primer
gtaaaacgacggccagtaaggcaacaaagcattcttcttc

SEQ ID NO: 128120 - DNA, 22 bp, Artificial Sequence
  primer
tgtggctgatctaccatttcag

SEQ ID NO: 128121 - DNA, 40 bp, Artificial Sequence
  primer
gtaaaacgacggccagtttgctccctataccagacacatc

SEQ ID NO: 128122 - DNA, 21 bp, Artificial Sequence
  primer
ataaacacaggccagaaaggg

SEQ ID NO: 128123 - DNA, 21 bp, Artificial Sequence
  primer
ttcagaatagtgccttgcacc

SEQ ID NO: 128124 - DNA, 25 bp, Artificial Sequence
  primer
tttccctttaatcagctttagtgtc

SEQ ID NO: 128125 - DNA, 20 bp, Artificial Sequence
  primer
tgctcatacacagctcaggc

SEQ ID NO: 128126 - DNA, 36 bp, Artificial Sequence
  primer
gtaaaacgacggccagtgcgtcagaaggagggtgag

SEQ ID NO: 128127 - DNA, 21 bp, Artificial Sequence
  primer
atcccacacaatggaaggaag

SEQ ID NO: 128128 - DNA, 39 bp, Artificial Sequence
  primer
gtaaaacgacggccagttttaacaccaccacactgaagc

SEQ ID NO: 128129 - DNA, 21 bp, Artificial Sequence
  primer
aggagattaactcgggtgtgc

SEQ ID NO: 128130 - DNA, 38 bp, Artificial Sequence
  primer
gtaaaacgacggccagtagcaagatgtttgtgaaacgc

SEQ ID NO: 128131 - DNA, 42 bp, Artificial Sequence
  primer
gtaaaacgacggccagtcacaaattaaccactgtgatatggg

SEQ ID NO: 128132 - DNA, 20 bp, Artificial Sequence
  primer
cctttctgcactgcactcct

SEQ ID NO: 128133 - DNA, 21 bp, Artificial Sequence
  primer
gaagtgccctttgaatgacag

SEQ ID NO: 128134 - DNA, 21 bp, Artificial Sequence
  primer
tgggttaatctggaaggatgg

SEQ ID NO: 128135 - DNA, 22 bp, Artificial Sequence
  primer
tgtgaggataaatacatggccc

SEQ ID NO: 128136 - DNA, 22 bp, Artificial Sequence
  primer
ccaggatggatcattattaccg

SEQ ID NO: 128137 - DNA, 21 bp, Artificial Sequence
  primer
ggcaaatgttcaccctcaatc

SEQ ID NO: 128138 - DNA, 21 bp, Artificial Sequence
  primer
aagaatggcaaatgttcaccc

SEQ ID NO: 128139 - DNA, 38 bp, Artificial Sequence
  primer
gtaaaacgacggccagtccttctctggcagtttcaacc

SEQ ID NO: 128140 - DNA, 23 bp, Artificial Sequence
  primer
catacgtctgttgagttccttgc

SEQ ID NO: 128141 - DNA, 38 bp, Artificial Sequence
  primer
gtaaaacgacggccagtataagggatgtggttggatgg

SEQ ID NO: 128142 - DNA, 21 bp, Artificial Sequence
  primer
cagcaggagtcatgaaccaag

SEQ ID NO: 128143 - DNA, 18 bp, Artificial Sequence
  primer
aggtacctgccaccacgc

SEQ ID NO: 128144 - DNA, 22 bp, Artificial Sequence
  primer
tgctactaaccttctgcctgtg

SEQ ID NO: 128145 - DNA, 43 bp, Artificial Sequence
  primer
gtaaaacgacggccagttgcttcttgtcaatttactgtactcc

SEQ ID NO: 128146 - DNA, 44 bp, Artificial Sequence
  primer
gtaaaacgacggccagtcaagaaggaactagatagctagaaggg

SEQ ID NO: 128147 - DNA, 38 bp, Artificial Sequence
  primer
gtaaaacgacggccagttagaacctagctcacggccac

SEQ ID NO: 128148 - DNA, 22 bp, Artificial Sequence
  primer
tttaggttgttccttgttcagg

SEQ ID NO: 128149 - DNA, 39 bp, Artificial Sequence
  primer
gtaaaacgacggccagtctggtggtgacacaagaagttg

SEQ ID NO: 128150 - DNA, 20 bp, Artificial Sequence
  primer
gcacgacaattgcttgaatc

SEQ ID NO: 128151 - DNA, 21 bp, Artificial Sequence
  primer
tatgcaacaagctatggcagc

SEQ ID NO: 128152 - DNA, 37 bp, Artificial Sequence
  primer
gtaaaacgacggccagtgtgcctggccaaagctattc

SEQ ID NO: 128153 - DNA, 21 bp, Artificial Sequence
  primer
tctgccttacagtgggagacc

SEQ ID NO: 128154 - DNA, 21 bp, Artificial Sequence
  primer
gccctcaggtttcttcagatg

SEQ ID NO: 128155 - DNA, 20 bp, Artificial Sequence
  primer
tcttccctttggaatcggtg

SEQ ID NO: 128156 - DNA, 21 bp, Artificial Sequence
  primer
ccactgactggaggaagaacg

SEQ ID NO: 128157 - DNA, 21 bp, Artificial Sequence
  primer
gaggagacactatcaaggccc

SEQ ID NO: 128158 - DNA, 38 bp, Artificial Sequence
  primer
gtaaaacgacggccagtgccataaagtcacatgggatg

SEQ ID NO: 128159 - DNA, 22 bp, Artificial Sequence
  primer
ttaaatccttgaaacagctggg

SEQ ID NO: 128160 - DNA, 38 bp, Artificial Sequence
  primer
gtaaaacgacggccagtcaatcagcgaactgaaattgg

SEQ ID NO: 128161 - DNA, 38 bp, Artificial Sequence
  primer
gtaaaacgacggccagtgcttactgctttagcaagggc

SEQ ID NO: 128162 - DNA, 20 bp, Artificial Sequence
  primer
tctgatagccactggcaagg

SEQ ID NO: 128163 - DNA, 21 bp, Artificial Sequence
  primer
gaacaaggaatccaatccagc

SEQ ID NO: 128164 - DNA, 21 bp, Artificial Sequence
  primer
gttccacatcactcaccatcc

SEQ ID NO: 128165 - DNA, 21 bp, Artificial Sequence
  primer
taaacaagtcaggcagccaac

SEQ ID NO: 128166 - DNA, 38 bp, Artificial Sequence
  primer
gtaaaacgacggccagtttcctctggagctcctactcg

SEQ ID NO: 128167 - DNA, 19 bp, Artificial Sequence
  primer
gtggatgttcaccgacagg

SEQ ID NO: 128168 - DNA, 21 bp, Artificial Sequence
  primer
gtgaggaagaagggagtgtgg

SEQ ID NO: 128169 - DNA, 38 bp, Artificial Sequence
  primer
gtaaaacgacggccagtccagtggcctctctgtgtctc

SEQ ID NO: 128170 - DNA, 18 bp, Artificial Sequence
  primer
ctgtgggcactcatgcct

SEQ ID NO: 128171 - DNA, 21 bp, Artificial Sequence
  primer
aggtcaccatgttctccttgg

SEQ ID NO: 128172 - DNA, 18 bp, Artificial Sequence
  primer
gccctccaggctcttctg

SEQ ID NO: 128173 - DNA, 36 bp, Artificial Sequence
  primer
gtaaaacgacggccagtggccatcatgagccacttg

SEQ ID NO: 128174 - DNA, 37 bp, Artificial Sequence
  primer
gtaaaacgacggccagtgaccggtactgcgaggagtc

SEQ ID NO: 128175 - DNA, 21 bp, Artificial Sequence
  primer
ggtttctgccgctttattgag

SEQ ID NO: 128176 - DNA, 19 bp, Artificial Sequence
  primer
ctagcctcagggcacttgg

SEQ ID NO: 128177 - DNA, 38 bp, Artificial Sequence
  primer
gtaaaacgacggccagttttggaaagctcccaccatac

SEQ ID NO: 128178 - DNA, 22 bp, Artificial Sequence
  primer
aatcgttgaattgaattgtgcc

SEQ ID NO: 128179 - DNA, 21 bp, Artificial Sequence
  primer
tgtccacattcagaacaagcc

SEQ ID NO: 128180 - DNA, 21 bp, Artificial Sequence
  primer
tgtcccagagagaatcccatc

SEQ ID NO: 128181 - DNA, 39 bp, Artificial Sequence
  primer
gtaaaacgacggccagtcagaaagagcaaggacacaaag

SEQ ID NO: 128182 - DNA, 38 bp, Artificial Sequence
  primer
gtaaaacgacggccagtccaaggaaggctaaaccagtg

SEQ ID NO: 128183 - DNA, 21 bp, Artificial Sequence
  primer
tagtgctctgtcctgcactgg

SEQ ID NO: 128184 - DNA, 38 bp, Artificial Sequence
  primer
gtaaaacgacggccagttgtctgtaagcagccacgttc

SEQ ID NO: 128185 - DNA, 38 bp, Artificial Sequence
  primer
gtaaaacgacggccagtggagaaacgagaatgcaggtc

SEQ ID NO: 128186 - DNA, 21 bp, Artificial Sequence
  primer
ctgccacaatgtgtatgaggc

SEQ ID NO: 128187 - DNA, 38 bp, Artificial Sequence
  primer
gtaaaacgacggccagtttcactagttcctgcaatccg

SEQ ID NO: 128188 - DNA, 21 bp, Artificial Sequence
  primer
tattccacatggcatcactcc

SEQ ID NO: 128189 - DNA, 37 bp, Artificial Sequence
  primer
gtaaaacgacggccagtcacaatcaagcgtgcaactg

SEQ ID NO: 128190 - DNA, 21 bp, Artificial Sequence
  primer
atgaaattggcctcttccttc

SEQ ID NO: 128191 - DNA, 37 bp, Artificial Sequence
  primer
gtaaaacgacggccagtgagtaacaaacggcctagcg

SEQ ID NO: 128192 - DNA, 38 bp, Artificial Sequence
  primer
gtaaaacgacggccagtgccagagtccaagagttcaag

SEQ ID NO: 128193 - DNA, 21 bp, Artificial Sequence
  primer
ctcctgccaatgcacttactg

SEQ ID NO: 128194 - DNA, 38 bp, Artificial Sequence
  primer
gtaaaacgacggccagtagtgagaccttgtctgggtcg

SEQ ID NO: 128195 - DNA, 21 bp, Artificial Sequence
  primer
ctttcttgccatcagcaacag

SEQ ID NO: 128196 - DNA, 22 bp, Artificial Sequence
  primer
tctccttatgaagcaaagccag

SEQ ID NO: 128197 - DNA, 23 bp, Artificial Sequence
  primer
tgtgatgatactgcactctagcc

SEQ ID NO: 128198 - DNA, 38 bp, Artificial Sequence
  primer
gtaaaacgacggccagtactcaaagtcacaggcactgg

SEQ ID NO: 128199 - DNA, 18 bp, Artificial Sequence
  primer
gaatcccgcagtcaccag

SEQ ID NO: 128200 - DNA, 21 bp, Artificial Sequence
  primer
tcccttctatgtcacttcggc

SEQ ID NO: 128201 - DNA, 20 bp, Artificial Sequence
  primer
cgctctaggatgtgggacag

SEQ ID NO: 128202 - DNA, 21 bp, Artificial Sequence
  primer
acatacgagatcaccatgggc

SEQ ID NO: 128203 - DNA, 20 bp, Artificial Sequence
  primer
aggttgcccagttaccgaac

SEQ ID NO: 128204 - DNA, 21 bp, Artificial Sequence
  primer
ctctggagtcctcctgcaatg

SEQ ID NO: 128205 - DNA, 37 bp, Artificial Sequence
  primer
gtaaaacgacggccagtccgctaacacaaacgtagcc

SEQ ID NO: 128206 - DNA, 21 bp, Artificial Sequence
  primer
tacagaatgcctgtgtccagc

SEQ ID NO: 128207 - DNA, 42 bp, Artificial Sequence
  primer
gtaaaacgacggccagtgcttcccttatgaatgtgtagatgg

SEQ ID NO: 128208 - DNA, 35 bp, Artificial Sequence
  primer
gtaaaacgacggccagtcctggaacagctggcaat

SEQ ID NO: 128209 - DNA, 37 bp, Artificial Sequence
  primer
gtaaaacgacggccagttcttgatttgggcagtttgg

SEQ ID NO: 128210 - DNA, 37 bp, Artificial Sequence
  primer
gtaaaacgacggccagtggaacactgaaagaaccggg

SEQ ID NO: 128211 - DNA, 38 bp, Artificial Sequence
  primer
gtaaaacgacggccagttgggttcctaagatcaaacgc

SEQ ID NO: 128212 - DNA, 21 bp, Artificial Sequence
  primer
accaagaggatgtccaagcac

SEQ ID NO: 128213 - DNA, 38 bp, Artificial Sequence
  primer
gtaaaacgacggccagtaaaccaactaaccagccaacc

SEQ ID NO: 128214 - DNA, 26 bp, Artificial Sequence
  primer
aaataagaggttaggtggtgaaactg

SEQ ID NO: 128215 - DNA, 38 bp, Artificial Sequence
  primer
gtaaaacgacggccagtttggtggacaggatttgtctg

SEQ ID NO: 128216 - DNA, 22 bp, Artificial Sequence
  primer
cctcatcttcaccctgaaacac

SEQ ID NO: 128217 - DNA, 21 bp, Artificial Sequence
  primer
tcaggaagagaaggctggttc

SEQ ID NO: 128218 - DNA, 21 bp, Artificial Sequence
  primer
tactcatgccgattcatcacc

SEQ ID NO: 128219 - DNA, 38 bp, Artificial Sequence
  primer
gtaaaacgacggccagtcaagtctcaccaatgacccag

SEQ ID NO: 128220 - DNA, 21 bp, Artificial Sequence
  primer
ctgctgtatgaggaatcaccg

SEQ ID NO: 128221 - DNA, 21 bp, Artificial Sequence
  primer
ccactggctgaacctgaactc

SEQ ID NO: 128222 - DNA, 21 bp, Artificial Sequence
  primer
ggctgatggatttggattcac

SEQ ID NO: 128223 - DNA, 39 bp, Artificial Sequence
  primer
gtaaaacgacggccagtggctgttaggaagttattgccc

SEQ ID NO: 128224 - DNA, 21 bp, Artificial Sequence
  primer
accctgccttctaggctattg

SEQ ID NO: 128225 - DNA, 21 bp, Artificial Sequence
  primer
atgttcattgcactctagccg

SEQ ID NO: 128226 - DNA, 21 bp, Artificial Sequence
  primer
tttggcatgtggaagtcacag

SEQ ID NO: 128227 - DNA, 21 bp, Artificial Sequence
  primer
aaatactcatgcacacccacg

SEQ ID NO: 128228 - DNA, 21 bp, Artificial Sequence
  primer
taagaggcgatgtggtacctg

SEQ ID NO: 128229 - DNA, 38 bp, Artificial Sequence
  primer
gtaaaacgacggccagtcaagttccagctcctttagcc

SEQ ID NO: 128230 - DNA, 38 bp, Artificial Sequence
  primer
gtaaaacgacggccagtagccacagagggatggattag

SEQ ID NO: 128231 - DNA, 38 bp, Artificial Sequence
  primer
gtaaaacgacggccagtaggtctccctttcagggtagg

SEQ ID NO: 128232 - DNA, 38 bp, Artificial Sequence
  primer
gtaaaacgacggccagtgtggagctgaatcaagagctg

SEQ ID NO: 128233 - DNA, 43 bp, Artificial Sequence
  primer
gtaaaacgacggccagtgggatatagctgtataggacacctcc

SEQ ID NO: 128234 - DNA, 21 bp, Artificial Sequence
  primer
ggctgatggatttggattcac

SEQ ID NO: 128235 - DNA, 40 bp, Artificial Sequence
  primer
gtaaaacgacggccagttgagatcaggattacacggtcag

SEQ ID NO: 128236 - DNA, 20 bp, Artificial Sequence
  primer
agttcccaacctggcaattc

SEQ ID NO: 128237 - DNA, 21 bp, Artificial Sequence
  primer
ttcagagaatgaccatacggg

SEQ ID NO: 128238 - DNA, 21 bp, Artificial Sequence
  primer
gggccaggagaaagtaggaag

SEQ ID NO: 128239 - DNA, 38 bp, Artificial Sequence
  primer
gtaaaacgacggccagtccaatgacactcacagacagc

SEQ ID NO: 128240 - DNA, 23 bp, Artificial Sequence
  primer
tgccaaacacatcagacttcatc

SEQ ID NO: 128241 - DNA, 38 bp, Artificial Sequence
  primer
gtaaaacgacggccagtaactgacatgcagagtggtcc

SEQ ID NO: 128242 - DNA, 38 bp, Artificial Sequence
  primer
gtaaaacgacggccagtatctaaatgcccagctggatg

SEQ ID NO: 128243 - DNA, 38 bp, Artificial Sequence
  primer
gtaaaacgacggccagtgaaataccaggcacagagcag

SEQ ID NO: 128244 - DNA, 21 bp, Artificial Sequence
  primer
tgttgcccttattccaaatcc

SEQ ID NO: 128245 - DNA, 40 bp, Artificial Sequence
  primer
gtaaaacgacggccagtggctaaatcaatgttaaagccaa

SEQ ID NO: 128246 - DNA, 21 bp, Artificial Sequence
  primer
caacccagccatagatcagac

SEQ ID NO: 128247 - DNA, 21 bp, Artificial Sequence
  primer
gctcttgatttcttgccatcc

SEQ ID NO: 128248 - DNA, 38 bp, Artificial Sequence
  primer
gtaaaacgacggccagtagacattaaacgccatggtcc

SEQ ID NO: 128249 - DNA, 18 bp, Artificial Sequence
  primer
gaagcgactctgggccac

SEQ ID NO: 128250 - DNA, 38 bp, Artificial Sequence
  primer
gtaaaacgacggccagttcttctccaggtgaccactcc

SEQ ID NO: 128251 - DNA, 38 bp, Artificial Sequence
  primer
gtaaaacgacggccagtgatttgcctgcctggaagtag

SEQ ID NO: 128252 - DNA, 38 bp, Artificial Sequence
  primer
gtaaaacgacggccagtcttaaaggctcagctgtggtg

SEQ ID NO: 128253 - DNA, 21 bp, Artificial Sequence
  primer
ccacaatatgtgggtcactgc

SEQ ID NO: 128254 - DNA, 21 bp, Artificial Sequence
  primer
tgggagagatgtagcctctgc

SEQ ID NO: 128255 - DNA, 19 bp, Artificial Sequence
  primer
tcctgtagatgggcttggg

SEQ ID NO: 128256 - DNA, 21 bp, Artificial Sequence
  primer
gccttggtttactcatctggg

SEQ ID NO: 128257 - DNA, 21 bp, Artificial Sequence
  primer
taaggagagcctagagcctgg

SEQ ID NO: 128258 - DNA, 21 bp, Artificial Sequence
  primer
agctttctaaagcatgcaggg

SEQ ID NO: 128259 - DNA, 21 bp, Artificial Sequence
  primer
tctgatgatgtgacggtggtc

SEQ ID NO: 128260 - DNA, 35 bp, Artificial Sequence
  primer
gtaaaacgacggccagtagcccagatcccgttcag

SEQ ID NO: 128261 - DNA, 21 bp, Artificial Sequence
  primer
attctgcatccctaagttgcc

SEQ ID NO: 128262 - DNA, 38 bp, Artificial Sequence
  primer
gtaaaacgacggccagtagaaccactttcaggaagggc

SEQ ID NO: 128263 - DNA, 21 bp, Artificial Sequence
  primer
cgagcaatgattccttcaatg

SEQ ID NO: 128264 - DNA, 20 bp, Artificial Sequence
  primer
cacgcaccttgtagtcccag

SEQ ID NO: 128265 - DNA, 38 bp, Artificial Sequence
  primer
gtaaaacgacggccagttaaggccagtgtctgagcaag

SEQ ID NO: 128266 - DNA, 21 bp, Artificial Sequence
  primer
cttgatgtgtcatgggtttcg

SEQ ID NO: 128267 - DNA, 21 bp, Artificial Sequence
  primer
aggcaaatccatttcttgacc

SEQ ID NO: 128268 - DNA, 38 bp, Artificial Sequence
  primer
gtaaaacgacggccagttgaggcaggtctcgtcataag

SEQ ID NO: 128269 - DNA, 21 bp, Artificial Sequence
  primer
tctgcttattctctggcctgc

SEQ ID NO: 128270 - DNA, 18 bp, Artificial Sequence
  primer
cttcaagagcccaccagc

SEQ ID NO: 128271 - DNA, 37 bp, Artificial Sequence
  primer
gtaaaacgacggccagtaaatcagcagagatgccacc

SEQ ID NO: 128272 - DNA, 21 bp, Artificial Sequence
  primer
tggactcatctctggttctgc

SEQ ID NO: 128273 - DNA, 21 bp, Artificial Sequence
  primer
ggtgacaagagtgaaactccg

SEQ ID NO: 128274 - DNA, 22 bp, Artificial Sequence
  primer
aacgcagtgagtgtttaggctc

SEQ ID NO: 128275 - DNA, 21 bp, Artificial Sequence
  primer
atgtgatggtcagtgcattcc

SEQ ID NO: 128276 - DNA, 38 bp, Artificial Sequence
  primer
gtaaaacgacggccagtatagccagagaggaagggcac

SEQ ID NO: 128277 - DNA, 36 bp, Artificial Sequence
  primer
gtaaaacgacggccagtcaccacgtgactggtttgg

SEQ ID NO: 128278 - DNA, 38 bp, Artificial Sequence
  primer
gtaaaacgacggccagtcataggagcttctggctcacc

SEQ ID NO: 128279 - DNA, 21 bp, Artificial Sequence
  primer
acatctctgtctctggtcggg

SEQ ID NO: 128280 - DNA, 38 bp, Artificial Sequence
  primer
gtaaaacgacggccagtctattgcctcagaccctctgg

SEQ ID NO: 128281 - DNA, 38 bp, Artificial Sequence
  primer
gtaaaacgacggccagtaaaggctcgcttcattgctac

SEQ ID NO: 128282 - DNA, 38 bp, Artificial Sequence
  primer
gtaaaacgacggccagtgtgaccaaggccagtctcttc

SEQ ID NO: 128283 - DNA, 40 bp, Artificial Sequence
  primer
gtaaaacgacggccagtgcacatgtgtcagatagggaaac

SEQ ID NO: 128284 - DNA, 37 bp, Artificial Sequence
  primer
gtaaaacgacggccagtctcagacaggagcatggagg

SEQ ID NO: 128285 - DNA, 38 bp, Artificial Sequence
  primer
gtaaaacgacggccagtcattcatggtcttcctccacg

SEQ ID NO: 128286 - DNA, 21 bp, Artificial Sequence
  primer
cctccctccatgagtctcaac

SEQ ID NO: 128287 - DNA, 19 bp, Artificial Sequence
  primer
agggccagtgtgtcagagg

SEQ ID NO: 128288 - DNA, 38 bp, Artificial Sequence
  primer
gtaaaacgacggccagttcccttaggtacaggtgtggg

SEQ ID NO: 128289 - DNA, 21 bp, Artificial Sequence
  primer
gaccctgcagagagacactcc

SEQ ID NO: 128290 - DNA, 37 bp, Artificial Sequence
  primer
gtaaaacgacggccagtctggaactcaggcagcagac

SEQ ID NO: 128291 - DNA, 20 bp, Artificial Sequence
  primer
cacgtgattccttctccagc

SEQ ID NO: 128292 - DNA, 21 bp, Artificial Sequence
  primer
tctgcaagagcttatcatggg

SEQ ID NO: 128293 - DNA, 37 bp, Artificial Sequence
  primer
gtaaaacgacggccagtgccttggcctcatccttatc

SEQ ID NO: 128294 - DNA, 38 bp, Artificial Sequence
  primer
gtaaaacgacggccagtaagggctgcatcagtcttcag

SEQ ID NO: 128295 - DNA, 38 bp, Artificial Sequence
  primer
gtaaaacgacggccagtacaaataaagagcccttcccg

SEQ ID NO: 128296 - DNA, 37 bp, Artificial Sequence
  primer
gtaaaacgacggccagtctgagcttaggccaaggtgg

SEQ ID NO: 128297 - DNA, 21 bp, Artificial Sequence
  primer
atggtgaggaggcagtttcac

SEQ ID NO: 128298 - DNA, 22 bp, Artificial Sequence
  primer
tcagtccaaggtagtcctgagc

SEQ ID NO: 128299 - DNA, 21 bp, Artificial Sequence
  primer
gtctcagacaccctttgggac

SEQ ID NO: 128300 - DNA, 21 bp, Artificial Sequence
  primer
ggcttctgtccacacttaccc

SEQ ID NO: 128301 - DNA, 21 bp, Artificial Sequence
  primer
cacacgaagctgaaaggactg

SEQ ID NO: 128302 - DNA, 21 bp, Artificial Sequence
  primer
tgtgtggaggagtttcaggtg

SEQ ID NO: 128303 - DNA, 38 bp, Artificial Sequence
  primer
gtaaaacgacggccagtatgacttccagtctgtggctg

SEQ ID NO: 128304 - DNA, 20 bp, Artificial Sequence
  primer
aagcaaggcacagaggtcag

SEQ ID NO: 128305 - DNA, 21 bp, Artificial Sequence
  primer
gagtgcatgtactgctccgtg

SEQ ID NO: 128306 - DNA, 37 bp, Artificial Sequence
  primer
gtaaaacgacggccagtgacacaaagtgtgcattggg

SEQ ID NO: 128307 - DNA, 37 bp, Artificial Sequence
  primer
gtaaaacgacggccagtcgccttgagaagtaggtggg

SEQ ID NO: 128308 - DNA, 20 bp, Artificial Sequence
  primer
aaagcagaagcatgcacagg

SEQ ID NO: 128309 - DNA, 20 bp, Artificial Sequence
  primer
ccactgtgagaatgggttcc

SEQ ID NO: 128310 - DNA, 22 bp, Artificial Sequence
  primer
tctcttattctcagcagcaggg

SEQ ID NO: 128311 - DNA, 39 bp, Artificial Sequence
  primer
gtaaaacgacggccagtgaagagaatcagaatccagccc

SEQ ID NO: 128312 - DNA, 21 bp, Artificial Sequence
  primer
atctccacctcactggaaacg

SEQ ID NO: 128313 - DNA, 22 bp, Artificial Sequence
  primer
agacagagacacaggtgcacag

SEQ ID NO: 128314 - DNA, 38 bp, Artificial Sequence
  primer
gtaaaacgacggccagtccacacctgctttcacaactg

SEQ ID NO: 128315 - DNA, 21 bp, Artificial Sequence
  primer
atctgggcatcctggtgtaag

SEQ ID NO: 128316 - DNA, 21 bp, Artificial Sequence
  primer
gaaatgccatcagagggaaac

SEQ ID NO: 128317 - DNA, 23 bp, Artificial Sequence
  primer
ggattgaaagacactatgtgggc

SEQ ID NO: 128318 - DNA, 35 bp, Artificial Sequence
  primer
gtaaaacgacggccagtgggtggtgatgggtggtt

SEQ ID NO: 128319 - DNA, 38 bp, Artificial Sequence
  primer
gtaaaacgacggccagtaaatgaacaatggtgctgacg

SEQ ID NO: 128320 - DNA, 21 bp, Artificial Sequence
  primer
ttctttgttacacagggcagc

SEQ ID NO: 128321 - DNA, 21 bp, Artificial Sequence
  primer
cagaggtcactcgcaaagagg

SEQ ID NO: 128322 - DNA, 21 bp, Artificial Sequence
  primer
ctcctcaccatccatcctctc

SEQ ID NO: 128323 - DNA, 23 bp, Artificial Sequence
  primer
cattcaccttatgcctacgacac

SEQ ID NO: 128324 - DNA, 38 bp, Artificial Sequence
  primer
gtaaaacgacggccagttcctcacctggaggataaagg

SEQ ID NO: 128325 - DNA, 20 bp, Artificial Sequence
  primer
ccagcctaggtggcagagag

SEQ ID NO: 128326 - DNA, 38 bp, Artificial Sequence
  primer
gtaaaacgacggccagttggagtctgcttggctattcc

SEQ ID NO: 128327 - DNA, 21 bp, Artificial Sequence
  primer
tccttgaacttggagagggag

SEQ ID NO: 128328 - DNA, 21 bp, Artificial Sequence
  primer
aagcatgttgctgattccttg

SEQ ID NO: 128329 - DNA, 21 bp, Artificial Sequence
  primer
tttgtagcatttccatgtggc

SEQ ID NO: 128330 - DNA, 38 bp, Artificial Sequence
  primer
gtaaaacgacggccagttgaggcaaggagagtagttgg

SEQ ID NO: 128331 - DNA, 21 bp, Artificial Sequence
  primer
gggccttccttgaactcaatc

SEQ ID NO: 128332 - DNA, 20 bp, Artificial Sequence
  primer
gatccaaacctgcagcaaag

SEQ ID NO: 128333 - DNA, 38 bp, Artificial Sequence
  primer
gtaaaacgacggccagtctacagagaaactgggcaggg

SEQ ID NO: 128334 - DNA, 20 bp, Artificial Sequence
  primer
tggcaggtgacagagctaag

SEQ ID NO: 128335 - DNA, 39 bp, Artificial Sequence
  primer
gtaaaacgacggccagttgcaaagtatttaaattggccc

SEQ ID NO: 128336 - DNA, 22 bp, Artificial Sequence
  primer
gccctgttgtactgtaggtgtg

SEQ ID NO: 128337 - DNA, 22 bp, Artificial Sequence
  primer
tcctgtactcaaagatcctggc

SEQ ID NO: 128338 - DNA, 21 bp, Artificial Sequence
  primer
cagccttcctctacagacacg

SEQ ID NO: 128339 - DNA, 22 bp, Artificial Sequence
  primer
acagtattgaccctgcacactg

SEQ ID NO: 128340 - DNA, 21 bp, Artificial Sequence
  primer
aggacattgccatggtagctc

SEQ ID NO: 128341 - DNA, 38 bp, Artificial Sequence
  primer
gtaaaacgacggccagtaagtggtgattcaaacccagg

SEQ ID NO: 128342 - DNA, 21 bp, Artificial Sequence
  primer
agagaatgacaaggaggctgg

SEQ ID NO: 128343 - DNA, 21 bp, Artificial Sequence
  primer
ctatgctgtgtgcagagggtg

SEQ ID NO: 128344 - DNA, 38 bp, Artificial Sequence
  primer
gtaaaacgacggccagttgtataggctgaaacggtccc

SEQ ID NO: 128345 - DNA, 21 bp, Artificial Sequence
  primer
ctggcctcaccaaccttagag

SEQ ID NO: 128346 - DNA, 21 bp, Artificial Sequence
  primer
ctgcatggcttccttgtcttc

SEQ ID NO: 128347 - DNA, 37 bp, Artificial Sequence
  primer
gtaaaacgacggccagtaggcctggagcaagagacag

SEQ ID NO: 128348 - DNA, 21 bp, Artificial Sequence
  primer
ttggagattgctgtcaggttc

SEQ ID NO: 128349 - DNA, 21 bp, Artificial Sequence
  primer
agttcctcctgaagatgctgg

SEQ ID NO: 128350 - DNA, 21 bp, Artificial Sequence
  primer
gtaggtccgtagcaggtggtc

SEQ ID NO: 128351 - DNA, 37 bp, Artificial Sequence
  primer
gtaaaacgacggccagtcaaaccgtctgcagaggaac

SEQ ID NO: 128352 - DNA, 21 bp, Artificial Sequence
  primer
caaagaacaacacttgcagcc

SEQ ID NO: 128353 - DNA, 21 bp, Artificial Sequence
  primer
tcccacagacattgacagacc

SEQ ID NO: 128354 - DNA, 36 bp, Artificial Sequence
  primer
gtaaaacgacggccagtgtcagcctcacccatgagc

SEQ ID NO: 128355 - DNA, 21 bp, Artificial Sequence
  primer
gacagaggcactgagaagctg

SEQ ID NO: 128356 - DNA, 21 bp, Artificial Sequence
  primer
gagggcggtctttatttctgg

SEQ ID NO: 128357 - DNA, 21 bp, Artificial Sequence
  primer
aatctgcagtggtaacgggac

SEQ ID NO: 128358 - DNA, 40 bp, Artificial Sequence
  primer
gtaaaacgacggccagtaggcaatgtaatttagcaagtgg

SEQ ID NO: 128359 - DNA, 21 bp, Artificial Sequence
  primer
gccaatttcttctaccaggct

SEQ ID NO: 128360 - DNA, 21 bp, Artificial Sequence
  primer
acaaaccatctccaaatgagc

SEQ ID NO: 128361 - DNA, 39 bp, Artificial Sequence
  primer
gtaaaacgacggccagttgggaggccataatttctaaag

SEQ ID NO: 128362 - DNA, 38 bp, Artificial Sequence
  primer
gtaaaacgacggccagtgaatcatgtggtgaaaccctg

SEQ ID NO: 128363 - DNA, 38 bp, Artificial Sequence
  primer
gtaaaacgacggccagtaaaggaaagggaggctgtttc

SEQ ID NO: 128364 - DNA, 38 bp, Artificial Sequence
  primer
gtaaaacgacggccagttgtttggaattcatttggctc

SEQ ID NO: 128365 - DNA, 20 bp, Artificial Sequence
  primer
tgttgaattctggtggtgcc

SEQ ID NO: 128366 - DNA, 40 bp, Artificial Sequence
  primer
gtaaaacgacggccagtaaacaaattgcttgactccagtg

SEQ ID NO: 128367 - DNA, 21 bp, Artificial Sequence
  primer
ggcctcaatggaattatgctc

SEQ ID NO: 128368 - DNA, 44 bp, Artificial Sequence
  primer
gtaaaacgacggccagtcctctcccatatctctaaatctaaacc

SEQ ID NO: 128369 - DNA, 38 bp, Artificial Sequence
  primer
gtaaaacgacggccagttcctcccaggatggatacaag

SEQ ID NO: 128370 - DNA, 20 bp, Artificial Sequence
  primer
cccactgaccttcaggctac

SEQ ID NO: 128371 - DNA, 22 bp, Artificial Sequence
  primer
ggataatggaagctgacgtacc

SEQ ID NO: 128372 - DNA, 37 bp, Artificial Sequence
  primer
gtaaaacgacggccagttgatgtgaaggcaagtttgg

SEQ ID NO: 128373 - DNA, 38 bp, Artificial Sequence
  primer
gtaaaacgacggccagtctcacaccaatagtcatgggc

SEQ ID NO: 128374 - DNA, 39 bp, Artificial Sequence
  primer
gtaaaacgacggccagtgggtaatggtagtggtgttgga

SEQ ID NO: 128375 - DNA, 42 bp, Artificial Sequence
  primer
gtaaaacgacggccagttcacaaggttaagttactcggtttg

SEQ ID NO: 128376 - DNA, 24 bp, Artificial Sequence
  primer
aaagagcaggtgaatttacaaaca

SEQ ID NO: 128377 - DNA, 24 bp, Artificial Sequence
  primer
aaagcatgatgcaaatacatgttc

SEQ ID NO: 128378 - DNA, 20 bp, Artificial Sequence
  primer
gatagacgcgtgttcaagcc

SEQ ID NO: 128379 - DNA, 41 bp, Artificial Sequence
  primer
gtaaaacgacggccagtaaacagtgcaacagtagtttctga

SEQ ID NO: 128380 - DNA, 21 bp, Artificial Sequence
  primer
tccctttctaaggcagtttgc

SEQ ID NO: 128381 - DNA, 19 bp, Artificial Sequence
  primer
acaaccaccatcaccctcc

SEQ ID NO: 128382 - DNA, 38 bp, Artificial Sequence
  primer
gtaaaacgacggccagttcagtgctcactttctcaggg

SEQ ID NO: 128383 - DNA, 21 bp, Artificial Sequence
  primer
cttcaaagtatgccgctcttg

SEQ ID NO: 128384 - DNA, 38 bp, Artificial Sequence
  primer
gtaaaacgacggccagtaggtctttcccagattccctg

SEQ ID NO: 128385 - DNA, 21 bp, Artificial Sequence
  primer
tgccctgaaattccagttatg

SEQ ID NO: 128386 - DNA, 21 bp, Artificial Sequence
  primer
cccacgagtggtttaaatgtg

SEQ ID NO: 128387 - DNA, 21 bp, Artificial Sequence
  primer
gcatagcaaacagcattcacc

SEQ ID NO: 128388 - DNA, 38 bp, Artificial Sequence
  primer
gtaaaacgacggccagtactcagattgacctcgggaag

SEQ ID NO: 128389 - DNA, 18 bp, Artificial Sequence
  primer
ttggctgtagcctggtgg

SEQ ID NO: 128390 - DNA, 44 bp, Artificial Sequence
  primer
gtaaaacgacggccagtgcagtaggtaaagaacattgatagagg

SEQ ID NO: 128391 - DNA, 44 bp, Artificial Sequence
  primer
gtaaaacgacggccagtcatagtggtactagatccagaggacac

SEQ ID NO: 128392 - DNA, 21 bp, Artificial Sequence
  primer
cacagtggcaatgataaaggg

SEQ ID NO: 128393 - DNA, 21 bp, Artificial Sequence
  primer
gtaaagcattacttgctggcg

SEQ ID NO: 128394 - DNA, 39 bp, Artificial Sequence
  primer
gtaaaacgacggccagtaaaggcacaacaaataaccacc

SEQ ID NO: 128395 - DNA, 22 bp, Artificial Sequence
  primer
ggcaggagtctgcctaatcttc

SEQ ID NO: 128396 - DNA, 38 bp, Artificial Sequence
  primer
gtaaaacgacggccagtaggagagcctattgctgcttg

SEQ ID NO: 128397 - DNA, 21 bp, Artificial Sequence
  primer
tatcccactttcgctgagatg

SEQ ID NO: 128398 - DNA, 37 bp, Artificial Sequence
  primer
gtaaaacgacggccagtgatgccactaatgccaccac

SEQ ID NO: 128399 - DNA, 38 bp, Artificial Sequence
  primer
gtaaaacgacggccagtgtcactgcaccttctccacag

SEQ ID NO: 128400 - DNA, 23 bp, Artificial Sequence
  primer
catttccgaacagattatgcaac

SEQ ID NO: 128401 - DNA, 27 bp, Artificial Sequence
  primer
tgaatcctctcactactagccatttag

SEQ ID NO: 128402 - DNA, 22 bp, Artificial Sequence
  primer
tcctgctcttatatttggaggc

SEQ ID NO: 128403 - DNA, 39 bp, Artificial Sequence
  primer
gtaaaacgacggccagtgaggcttaaagagcaaggaagg

SEQ ID NO: 128404 - DNA, 21 bp, Artificial Sequence
  primer
tttaccgtggacgtgtattgc

SEQ ID NO: 128405 - DNA, 42 bp, Artificial Sequence
  primer
gtaaaacgacggccagttgtgccatctaaagtaactctgagc

SEQ ID NO: 128406 - DNA, 21 bp, Artificial Sequence
  primer
gcacagccacatatgaaatcc

SEQ ID NO: 128407 - DNA, 22 bp, Artificial Sequence
  primer
ttaaagcatcattcagaagccc

SEQ ID NO: 128408 - DNA, 36 bp, Artificial Sequence
  primer
gtaaaacgacggccagtacctaagccagcgtgcaac

SEQ ID NO: 128409 - DNA, 21 bp, Artificial Sequence
  primer
cgaagctaacaataccagccc

SEQ ID NO: 128410 - DNA, 20 bp, Artificial Sequence
  primer
gctccacctgccatatcaac

SEQ ID NO: 128411 - DNA, 21 bp, Artificial Sequence
  primer
agaacacgcctctctcctcac

SEQ ID NO: 128412 - DNA, 39 bp, Artificial Sequence
  primer
gtaaaacgacggccagtgcattcctctaacctaggctgc

SEQ ID NO: 128413 - DNA, 21 bp, Artificial Sequence
  primer
ttgacttccgttcttggtgtc

SEQ ID NO: 128414 - DNA, 39 bp, Artificial Sequence
  primer
gtaaaacgacggccagttgagctcaaggctgacatacag

SEQ ID NO: 128415 - DNA, 39 bp, Artificial Sequence
  primer
gtaaaacgacggccagtaacggtaacaaactgaggaagc

SEQ ID NO: 128416 - DNA, 37 bp, Artificial Sequence
  primer
gtaaaacgacggccagtaataccatctgcctcctggg

SEQ ID NO: 128417 - DNA, 22 bp, Artificial Sequence
  primer
aagcaaaccatatcaggctcac

SEQ ID NO: 128418 - DNA, 38 bp, Artificial Sequence
  primer
gtaaaacgacggccagtaaatacagcaaccatcctggg

SEQ ID NO: 128419 - DNA, 38 bp, Artificial Sequence
  primer
gtaaaacgacggccagtctatggagcccaatcaaggag

SEQ ID NO: 128420 - DNA, 37 bp, Artificial Sequence
  primer
gtaaaacgacggccagtattataagcacgagccaccg

SEQ ID NO: 128421 - DNA, 20 bp, Artificial Sequence
  primer
agctgagctttagccaaccc

SEQ ID NO: 128422 - DNA, 21 bp, Artificial Sequence
  primer
gcagactggctaacatggacc

SEQ ID NO: 128423 - DNA, 38 bp, Artificial Sequence
  primer
gtaaaacgacggccagtggactcaacctctttccctcc

SEQ ID NO: 128424 - DNA, 22 bp, Artificial Sequence
  primer
gaaacttaggaaaccacccagg

SEQ ID NO: 128425 - DNA, 44 bp, Artificial Sequence
  primer
gtaaaacgacggccagtgcctaaagatagacttacatttcaacc

SEQ ID NO: 128426 - DNA, 21 bp, Artificial Sequence
  primer
catccctccctttgtaagtgc

SEQ ID NO: 128427 - DNA, 21 bp, Artificial Sequence
  primer
aaagtcatggccaagcttcag

SEQ ID NO: 128428 - DNA, 21 bp, Artificial Sequence
  primer
cgacagtcctgagctgtaggg

SEQ ID NO: 128429 - DNA, 19 bp, Artificial Sequence
  primer
cgggtgacagagcaagacc

SEQ ID NO: 128430 - DNA, 27 bp, Artificial Sequence
  primer
gataagccaaatgatctaaggataaag

SEQ ID NO: 128431 - DNA, 38 bp, Artificial Sequence
  primer
gtaaaacgacggccagtcagcagcaatcctggtgtatg

SEQ ID NO: 128432 - DNA, 40 bp, Artificial Sequence
  primer
gtaaaacgacggccagttcgtggcttagttctaaggtgag

SEQ ID NO: 128433 - DNA, 22 bp, Artificial Sequence
  primer
tcagtctcaattcagtgatggc

SEQ ID NO: 128434 - DNA, 21 bp, Artificial Sequence
  primer
aatccctttggtggctaattt

SEQ ID NO: 128435 - DNA, 39 bp, Artificial Sequence
  primer
gtaaaacgacggccagttgaaacacagaaccacatcctg

SEQ ID NO: 128436 - DNA, 18 bp, Artificial Sequence
  primer
tgttagccaccgcacctg

SEQ ID NO: 128437 - DNA, 21 bp, Artificial Sequence
  primer
tccacagcgaagaatgttcag

SEQ ID NO: 128438 - DNA, 25 bp, Artificial Sequence
  primer
ttccttaaatacaatctgccctttc

SEQ ID NO: 128439 - DNA, 40 bp, Artificial Sequence
  primer
gtaaaacgacggccagtaagggaaagtattaggttggtgc

SEQ ID NO: 128440 - DNA, 39 bp, Artificial Sequence
  primer
gtaaaacgacggccagtgaatcacccggttcatgtagag

SEQ ID NO: 128441 - DNA, 22 bp, Artificial Sequence
  primer
gggcttccaatattctgagtgc

SEQ ID NO: 128442 - DNA, 22 bp, Artificial Sequence
  primer
gcaattaatgtcaaggcatctg

SEQ ID NO: 128443 - DNA, 20 bp, Artificial Sequence
  primer
ttcaaatgttggagccaatg

SEQ ID NO: 128444 - DNA, 38 bp, Artificial Sequence
  primer
gtaaaacgacggccagttctcaacccgattcaaccttc

SEQ ID NO: 128445 - DNA, 24 bp, Artificial Sequence
  primer
ttgcaaggaaaggatttaacagtc

SEQ ID NO: 128446 - DNA, 38 bp, Artificial Sequence
  primer
gtaaaacgacggccagttctccctctttgctaagaccc

SEQ ID NO: 128447 - DNA, 21 bp, Artificial Sequence
  primer
caaccacacaagccacctaac

SEQ ID NO: 128448 - DNA, 38 bp, Artificial Sequence
  primer
gtaaaacgacggccagtgtacctagaccagtgccaccc

SEQ ID NO: 128449 - DNA, 21 bp, Artificial Sequence
  primer
gcctggtcacaaatatccctc

SEQ ID NO: 128450 - DNA, 38 bp, Artificial Sequence
  primer
gtaaaacgacggccagtgttctctcgcccttacaggag

SEQ ID NO: 128451 - DNA, 21 bp, Artificial Sequence
  primer
ttgtgatcccactttgtcctg

SEQ ID NO: 128452 - DNA, 22 bp, Artificial Sequence
  primer
gcagacataccaaagcttccag

SEQ ID NO: 128453 - DNA, 21 bp, Artificial Sequence
  primer
gatgtggcagctgtttctgtc

SEQ ID NO: 128454 - DNA, 21 bp, Artificial Sequence
  primer
attgtgacttggtgctgatgg

SEQ ID NO: 128455 - DNA, 38 bp, Artificial Sequence
  primer
gtaaaacgacggccagtgagaaagctctcccacattcg

SEQ ID NO: 128456 - DNA, 38 bp, Artificial Sequence
  primer
gtaaaacgacggccagtacttctgtgaacagggttgcc

SEQ ID NO: 128457 - DNA, 20 bp, Artificial Sequence
  primer
ccaccattgccacagttacc

SEQ ID NO: 128458 - DNA, 20 bp, Artificial Sequence
  primer
acaaactcagcattccgctg

SEQ ID NO: 128459 - DNA, 21 bp, Artificial Sequence
  primer
ctctgagcaaagaagcatggg

SEQ ID NO: 128460 - DNA, 22 bp, Artificial Sequence
  primer
ttgggcatgtaaggagagagag

SEQ ID NO: 128461 - DNA, 19 bp, Artificial Sequence
  primer
catgtgccactatgcctgg

SEQ ID NO: 128462 - DNA, 21 bp, Artificial Sequence
  primer
aacgggacaagacctctgatg

SEQ ID NO: 128463 - DNA, 21 bp, Artificial Sequence
  primer
gggaaacaaaggcaggttagg

SEQ ID NO: 128464 - DNA, 21 bp, Artificial Sequence
  primer
tccaagtccaagtccaagtcc

SEQ ID NO: 128465 - DNA, 20 bp, Artificial Sequence
  primer
actggcctggtattcccaac

SEQ ID NO: 128466 - DNA, 38 bp, Artificial Sequence
  primer
gtaaaacgacggccagttggatggaagcacatcaaatc

SEQ ID NO: 128467 - DNA, 21 bp, Artificial Sequence
  primer
cccttgcatgaggtcctactc

SEQ ID NO: 128468 - DNA, 24 bp, Artificial Sequence
  primer
aatactcttagcatagtgctgggc

SEQ ID NO: 128469 - DNA, 39 bp, Artificial Sequence
  primer
gtaaaacgacggccagtgaaagatatgcttgtggcaacc

SEQ ID NO: 128470 - DNA, 21 bp, Artificial Sequence
  primer
cactgcagctttcttgtccag

SEQ ID NO: 128471 - DNA, 38 bp, Artificial Sequence
  primer
gtaaaacgacggccagtggataccactccacctggttc

SEQ ID NO: 128472 - DNA, 38 bp, Artificial Sequence
  primer
gtaaaacgacggccagtctttcactgcttcttccaccg

SEQ ID NO: 128473 - DNA, 38 bp, Artificial Sequence
  primer
gtaaaacgacggccagtgcccacctggatctctacaac

SEQ ID NO: 128474 - DNA, 38 bp, Artificial Sequence
  primer
gtaaaacgacggccagtcttccaaagatgtggagctgg

SEQ ID NO: 128475 - DNA, 36 bp, Artificial Sequence
  primer
gtaaaacgacggccagtggaggagtctcgagggagg

SEQ ID NO: 128476 - DNA, 18 bp, Artificial Sequence
  primer
tccaagtgccaggacacc

SEQ ID NO: 128477 - DNA, 38 bp, Artificial Sequence
  primer
gtaaaacgacggccagtgctccacttactgctccaagc

SEQ ID NO: 128478 - DNA, 38 bp, Artificial Sequence
  primer
gtaaaacgacggccagtgcctcacctctcctagaagcc

SEQ ID NO: 128479 - DNA, 37 bp, Artificial Sequence
  primer
gtaaaacgacggccagtaaaccagctgcactcgagac

SEQ ID NO: 128480 - DNA, 37 bp, Artificial Sequence
  primer
gtaaaacgacggccagtgtgacacaaacgaaggctgg

SEQ ID NO: 128481 - DNA, 38 bp, Artificial Sequence
  primer
gtaaaacgacggccagtctgactctcctcctaccctgg

SEQ ID NO: 128482 - DNA, 19 bp, Artificial Sequence
  primer
ctgaatgtggctggtcagg

SEQ ID NO: 128483 - DNA, 38 bp, Artificial Sequence
  primer
gtaaaacgacggccagtctcagttctcagctcaggcag

SEQ ID NO: 128484 - DNA, 19 bp, Artificial Sequence
  primer
ggtgcaggtacaggtggtg

SEQ ID NO: 128485 - DNA, 21 bp, Artificial Sequence
  primer
tcctctccacgtctctcttgg

SEQ ID NO: 128486 - DNA, 19 bp, Artificial Sequence
  primer
gtagtacggctcggctccc

SEQ ID NO: 128487 - DNA, 38 bp, Artificial Sequence
  primer
gtaaaacgacggccagtgaaaccacaagcgtcacactc

SEQ ID NO: 128488 - DNA, 21 bp, Artificial Sequence
  primer
ggaaagatcacacccttcctg

SEQ ID NO: 128489 - DNA, 38 bp, Artificial Sequence
  primer
gtaaaacgacggccagttgttccttgcatacatctggc

SEQ ID NO: 128490 - DNA, 40 bp, Artificial Sequence
  primer
gtaaaacgacggccagttgaacagcaatactgccaaatac

SEQ ID NO: 128491 - DNA, 26 bp, Artificial Sequence
  primer
ttaccatgatcaaagctagagttcac

SEQ ID NO: 128492 - DNA, 24 bp, Artificial Sequence
  primer
tgataaactccacacacacaacag

SEQ ID NO: 128493 - DNA, 20 bp, Artificial Sequence
  primer
ctgaacggtactccattgcc

SEQ ID NO: 128494 - DNA, 23 bp, Artificial Sequence
  primer
ggaacttgagatttgcattcttc

SEQ ID NO: 128495 - DNA, 21 bp, Artificial Sequence
  primer
ctggttacctcagggaattgg

SEQ ID NO: 128496 - DNA, 27 bp, Artificial Sequence
  primer
ttaagaacatgtaataatcacctcaaa

SEQ ID NO: 128497 - DNA, 45 bp, Artificial Sequence
  primer
gtaaaacgacggccagtaattatactttggctgagattcagaaat

SEQ ID NO: 128498 - DNA, 38 bp, Artificial Sequence
  primer
gtaaaacgacggccagtaagaatcgatgcccttctgag

SEQ ID NO: 128499 - DNA, 25 bp, Artificial Sequence
  primer
ccaggacctagacatatggtagaga

SEQ ID NO: 128500 - DNA, 24 bp, Artificial Sequence
  primer
tcaacaccaatcagttctagcttc

SEQ ID NO: 128501 - DNA, 21 bp, Artificial Sequence
  primer
cttccacctcagtctcccaag

SEQ ID NO: 128502 - DNA, 21 bp, Artificial Sequence
  primer
attcgcgggcacttatacttc

SEQ ID NO: 128503 - DNA, 23 bp, Artificial Sequence
  primer
aagctttggtataatcctttgcg

SEQ ID NO: 128504 - DNA, 21 bp, Artificial Sequence
  primer
aagggttcgaagagttcatgg

SEQ ID NO: 128505 - DNA, 39 bp, Artificial Sequence
  primer
gtaaaacgacggccagtaagcacagtgatttgcacatag

SEQ ID NO: 128506 - DNA, 22 bp, Artificial Sequence
  primer
tggatcaggactttcattctgc

SEQ ID NO: 128507 - DNA, 27 bp, Artificial Sequence
  primer
ctgaactacaaatgagcaaagtgtatt

SEQ ID NO: 128508 - DNA, 19 bp, Artificial Sequence
  primer
accttgtgatctgcctgcc

SEQ ID NO: 128509 - DNA, 24 bp, Artificial Sequence
  primer
tttcctttaggaagtccaagtagc

SEQ ID NO: 128510 - DNA, 21 bp, Artificial Sequence
  primer
caggtggtcaaggctacagtg

SEQ ID NO: 128511 - DNA, 39 bp, Artificial Sequence
  primer
gtaaaacgacggccagttgaagagcactatgccataccc

SEQ ID NO: 128512 - DNA, 25 bp, Artificial Sequence
  primer
attagcccactaattcatgttaagc

SEQ ID NO: 128513 - DNA, 38 bp, Artificial Sequence
  primer
gtaaaacgacggccagtgcagtgaatgccagcctaaac

SEQ ID NO: 128514 - DNA, 38 bp, Artificial Sequence
  primer
gtaaaacgacggccagttcagcataaaccctttccagg

SEQ ID NO: 128515 - DNA, 22 bp, Artificial Sequence
  primer
tccattgccagcttatacacac

SEQ ID NO: 128516 - DNA, 39 bp, Artificial Sequence
  primer
gtaaaacgacggccagtccacatgacttctgctcttcag

SEQ ID NO: 128517 - DNA, 21 bp, Artificial Sequence
  primer
gcaagactggccataagctac

SEQ ID NO: 128518 - DNA, 38 bp, Artificial Sequence
  primer
gtaaaacgacggccagtaacaacagggaccacagtcag

SEQ ID NO: 128519 - DNA, 20 bp, Artificial Sequence
  primer
gcctgagcagctgatttgtg

SEQ ID NO: 128520 - DNA, 40 bp, Artificial Sequence; identical to SEQ ID NO: 128490
  primer

SEQ ID NO: 128521 - DNA, 22 bp, Artificial Sequence
  primer
cacaatgaaacacctgcatagc

SEQ ID NO: 128522 - DNA, 38 bp, Artificial Sequence
  primer
gtaaaacgacggccagtcaaagtcaggatcaccttccg

SEQ ID NO: 128523 - DNA, 22 bp, Artificial Sequence
  primer
catttccaaaggtgtcgtacag

SEQ ID NO: 128524 - DNA, 21 bp, Artificial Sequence
  primer
agttcctctgccaagggtaag

SEQ ID NO: 128525 - DNA, 36 bp, Artificial Sequence
  primer
gtaaaacgacggccagtctgggctgcttcagttacg

SEQ ID NO: 128526 - DNA, 21 bp, Artificial Sequence
  primer
agggtgaacctgtgcaagaac

SEQ ID NO: 128527 - DNA, 21 bp, Artificial Sequence
  primer
cacagcttcagaacttccagc

SEQ ID NO: 128528 - DNA, 25 bp, Artificial Sequence
  primer
ctctgttttcctttgtcttaaactc

SEQ ID NO: 128529 - DNA, 21 bp, Artificial Sequence
  primer
caagctggcttcagattcagc

SEQ ID NO: 128530 - DNA, 38 bp, Artificial Sequence
  primer
gtaaaacgacggccagtcttctagttgacttgggcgtg

SEQ ID NO: 128531 - DNA, 26 bp, Artificial Sequence
  primer
cccagctaataatacatgcagaatac

SEQ ID NO: 128532 - DNA, 23 bp, Artificial Sequence
  primer
cctttatcaattgctttcacctc

SEQ ID NO: 128533 - DNA, 41 bp, Artificial Sequence
  primer
gtaaaacgacggccagttttataatggtttccttctcccac

SEQ ID NO: 128534 - DNA, 38 bp, Artificial Sequence
  primer
gtaaaacgacggccagtcctgagtgacaaagcgagact

SEQ ID NO: 128535 - DNA, 38 bp, Artificial Sequence
  primer
gtaaaacgacggccagtttcaaatagcagttgcagcac

SEQ ID NO: 128536 - DNA, 26 bp, Artificial Sequence
  primer
aaacttcagcctcatctttaagaaac

SEQ ID NO: 128537 - DNA, 38 bp, Artificial Sequence
  primer
gtaaaacgacggccagtctctaggacaacactcgaggc

SEQ ID NO: 128538 - DNA, 20 bp, Artificial Sequence
  primer
gttgcagtgagccaggtttg

SEQ ID NO: 128539 - DNA, 23 bp, Artificial Sequence
  primer
tgggtgacaagagagaaactgtg

SEQ ID NO: 128540 - DNA, 39 bp, Artificial Sequence
  primer
gtaaaacgacggccagtcccatttgttagaaaggaagga

SEQ ID NO: 128541 - DNA, 18 bp, Artificial Sequence
  primer
cgccactgcactccacta

SEQ ID NO: 128542 - DNA, 23 bp, Artificial Sequence
  primer
aaacgaagggagaatggtttatg

SEQ ID NO: 128543 - DNA, 24 bp, Artificial Sequence
  primer
ggtatgggtgaaatgatatgatgg

SEQ ID NO: 128544 - DNA, 26 bp, Artificial Sequence
  primer
catgtagaaccttcagtgtagctgag

SEQ ID NO: 128545 - DNA, 40 bp, Artificial Sequence
  primer
gtaaaacgacggccagtcacgtattcctgacctccttagc

SEQ ID NO: 128546 - DNA, 28 bp, Artificial Sequence
  primer
ccaacatagtaacccaaagtagtatcaa

SEQ ID NO: 128547 - DNA, 38 bp, Artificial Sequence
  primer
gtaaaacgacggccagttagtcccagctacttcggagg

SEQ ID NO: 128548 - DNA, 38 bp, Artificial Sequence
  primer
gtaaaacgacggccagtcaagagatcctcccacctcac

SEQ ID NO: 128549 - DNA, 40 bp, Artificial Sequence
  primer
gtaaaacgacggccagtaaagataggaggctaatgttggg

SEQ ID NO: 128550 - DNA, 23 bp, Artificial Sequence
  primer
ggacatgttatccatgaactcag

SEQ ID NO: 128551 - DNA, 38 bp, Artificial Sequence
  primer
gtaaaacgacggccagttttcctttgtctctggctttg

SEQ ID NO: 128552 - DNA, 39 bp, Artificial Sequence
  primer
gtaaaacgacggccagtgctgcctttaattctccagagc

SEQ ID NO: 128553 - DNA, 21 bp, Artificial Sequence
  primer
atcgttggttggatctcttcc

SEQ ID NO: 128554 - DNA, 39 bp, Artificial Sequence
  primer
gtaaaacgacggccagtcgatcaagctggtctctttagc

SEQ ID NO: 128555 - DNA, 22 bp, Artificial Sequence
  primer
tcagctgccaaagtattcacag

SEQ ID NO: 128556 - DNA, 23 bp, Artificial Sequence
  primer
ccttccagaaacagttcactcac

SEQ ID NO: 128557 - DNA, 21 bp, Artificial Sequence
  primer
aagtcccgctggtactgagtg

SEQ ID NO: 128558 - DNA, 38 bp, Artificial Sequence
  primer
gtaaaacgacggccagtagcccatacctgtacgacgtg

SEQ ID NO: 128559 - DNA, 35 bp, Artificial Sequence
  primer
gtaaaacgacggccagtgctcgagcactgagtccg

SEQ ID NO: 128560 - DNA, 21 bp, Artificial Sequence
  primer
tgctgtccctggtcataattg

SEQ ID NO: 128561 - DNA, 38 bp, Artificial Sequence
  primer
gtaaaacgacggccagttctcaagaggatgcttgaggc

SEQ ID NO: 128562 - DNA, 38 bp, Artificial Sequence
  primer
gtaaaacgacggccagtattcctgcctaagcaccagtc

SEQ ID NO: 128563 - DNA, 38 bp, Artificial Sequence
  primer
gtaaaacgacggccagttcctggtagggcaatagcttg

SEQ ID NO: 128564 - DNA, 36 bp, Artificial Sequence
  primer
gtaaaacgacggccagttacacctgggaggcaccac

SEQ ID NO: 128565 - DNA, 21 bp, Artificial Sequence
  primer
cactgtaatcctgggtacggc

SEQ ID NO: 128566 - DNA, 37 bp, Artificial Sequence
  primer
gtaaaacgacggccagtaatcagacagacacgctggc

SEQ ID NO: 128567 - DNA, 38 bp, Artificial Sequence
  primer
gtaaaacgacggccagtatgacccagctatgatctccc

SEQ ID NO: 128568 - DNA, 21 bp, Artificial Sequence
  primer
acatagactggctagggctgg

SEQ ID NO: 128569 - DNA, 21 bp, Artificial Sequence
  primer
caattcctcttcctccagacc

SEQ ID NO: 128570 - DNA, 20 bp, Artificial Sequence
  primer
ctctgctcctccttccaagc

SEQ ID NO: 128571 - DNA, 21 bp, Artificial Sequence
  primer
tgctccctcactcccaataac

SEQ ID NO: 128572 - DNA, 21 bp, Artificial Sequence
  primer
tgccctgtggtagtaacttgc

SEQ ID NO: 128573 - DNA, 21 bp, Artificial Sequence
  primer
gtgaagaccagaagggtcctg

SEQ ID NO: 128574 - DNA, 38 bp, Artificial Sequence
  primer
gtaaaacgacggccagtagtaaggtcgagcttccctcc

SEQ ID NO: 128575 - DNA, 38 bp, Artificial Sequence
  primer
gtaaaacgacggccagtgtcctgtccaccactctgctc

SEQ ID NO: 128576 - DNA, 21 bp, Artificial Sequence
  primer
acagatgggctagagtcctcc

SEQ ID NO: 128577 - DNA, 38 bp, Artificial Sequence
  primer
gtaaaacgacggccagttctacccacttcgagcatctg

SEQ ID NO: 128578 - DNA, 38 bp, Artificial Sequence
  primer
gtaaaacgacggccagtcccaggaggtaatctgtcagg

SEQ ID NO: 128579 - DNA, 21 bp, Artificial Sequence
  primer
acagggaaatggagagcaaac

SEQ ID NO: 128580 - DNA, 37 bp, Artificial Sequence
  primer
gtaaaacgacggccagtcctgttcccacaaagtttcc

SEQ ID NO: 128581 - DNA, 21 bp, Artificial Sequence
  primer
ttcaccacactgtccctgaac

SEQ ID NO: 128582 - DNA, 21 bp, Artificial Sequence
  primer
ctcctggttcagtcccttctc

SEQ ID NO: 128583 - DNA, 21 bp, Artificial Sequence
  primer
tcaatccttagaccctgtgcc

SEQ ID NO: 128584 - DNA, 21 bp, Artificial Sequence
  primer
tggtacccaactctggaaagg

SEQ ID NO: 128585 - DNA, 23 bp, Artificial Sequence
  primer
tgctcctagtaccacaaccattg

SEQ ID NO: 128586 - DNA, 38 bp, Artificial Sequence
  primer
gtaaaacgacggccagtacacctggataaaggtgggtg

SEQ ID NO: 128587 - DNA, 21 bp, Artificial Sequence
  primer
cctttgcgagtcagacacttg

SEQ ID NO: 128588 - DNA, 38 bp, Artificial Sequence
  primer
gtaaaacgacggccagtacctgtgctgccttagctttg

SEQ ID NO: 128589 - DNA, 21 bp, Artificial Sequence
  primer
ccgcctatctacctttatggc

SEQ ID NO: 128590 - DNA, 38 bp, Artificial Sequence
  primer
gtaaaacgacggccagtgtccacggacatagcacactg

SEQ ID NO: 128591 - DNA, 18 bp, Artificial Sequence
  primer
gcctgggtgacaaagcaa

SEQ ID NO: 128592 - DNA, 38 bp, Artificial Sequence
  primer
gtaaaacgacggccagttttgcctaagattggcatgag

SEQ ID NO: 128593 - DNA, 43 bp, Artificial Sequence
  primer
gtaaaacgacggccagttgccagatactaactatgctaggtcc

SEQ ID NO: 128594 - DNA, 21 bp, Artificial Sequence
  primer
acacccttcagaggctgtttc

SEQ ID NO: 128595 - DNA, 38 bp, Artificial Sequence
  primer
gtaaaacgacggccagtgatcaggcaacagtggttcag

SEQ ID NO: 128596 - DNA, 21 bp, Artificial Sequence
  primer
tcaggagaagctgaagtcacg

SEQ ID NO: 128597 - DNA, 21 bp, Artificial Sequence
  primer
gtcgaagtcctggctgcttag

SEQ ID NO: 128598 - DNA, 21 bp, Artificial Sequence
  primer
gaaagacgcaggacttgaagc

SEQ ID NO: 128599 - DNA, 22 bp, Artificial Sequence
  primer
aatcatacctggaggtgacagc

SEQ ID NO: 128600 - DNA, 21 bp, Artificial Sequence
  primer
tgtaagggttcaggaagaccc

SEQ ID NO: 128601 - DNA, 21 bp, Artificial Sequence
  primer
ctatgtgagagctgctggtgg

SEQ ID NO: 128602 - DNA, 20 bp, Artificial Sequence
  primer
tcatgagaacgatgggcttc

SEQ ID NO: 128603 - DNA, 37 bp, Artificial Sequence
  primer
gtaaaacgacggccagtgcaggagacagaggatgcag

SEQ ID NO: 128604 - DNA, 21 bp, Artificial Sequence
  primer
ttgcctacagagaggtggaag

SEQ ID NO: 128605 - DNA, 39 bp, Artificial Sequence
  primer
gtaaaacgacggccagtggtaacaccacttgaaacaccc

SEQ ID NO: 128606 - DNA, 38 bp, Artificial Sequence
  primer
gtaaaacgacggccagttgactggaagcacatggaatc

SEQ ID NO: 128607 - DNA, 21 bp, Artificial Sequence
  primer
actaagtggaccacccacacc

SEQ ID NO: 128608 - DNA, 21 bp, Artificial Sequence
  primer
ctgctgtcccttgagtcagtg

SEQ ID NO: 128609 - DNA, 20 bp, Artificial Sequence
  primer
agtgggaacttggaaggagc

SEQ ID NO: 128610 - DNA, 21 bp, Artificial Sequence
  primer
gggagtgggaattgttgacag

SEQ ID NO: 128611 - DNA, 20 bp, Artificial Sequence
  primer
catgtcgcctcctagaccag

SEQ ID NO: 128612 - DNA, 20 bp, Artificial Sequence
  primer
aggtcatgccgatctaaggg

SEQ ID NO: 128613 - DNA, 38 bp, Artificial Sequence
  primer
gtaaaacgacggccagtcctggacacctcatgtctctg

SEQ ID NO: 128614 - DNA, 21 bp, Artificial Sequence
  primer
ctctgagccatgcttctcctc

SEQ ID NO: 128615 - DNA, 38 bp, Artificial Sequence
  primer
gtaaaacgacggccagtatctagaaggcaggagcccag

SEQ ID NO: 128616 - DNA, 36 bp, Artificial Sequence
  primer
gtaaaacgacggccagtcttctgccctctcccaacc

SEQ ID NO: 128617 - DNA, 37 bp, Artificial Sequence
  primer
gtaaaacgacggccagtccttcgcaccacaaagattc

SEQ ID NO: 128618 - DNA, 21 bp, Artificial Sequence
  primer
aagacatcacagtgtcccagc

SEQ ID NO: 128619 - DNA, 38 bp, Artificial Sequence
  primer
gtaaaacgacggccagttcaatgctgaggtctttgctg

SEQ ID NO: 128620 - DNA, 20 bp, Artificial Sequence
  primer
gcctcttggttcccagtttc

SEQ ID NO: 128621 - DNA, 19 bp, Artificial Sequence
  primer
cttctggtgctcggctagg

SEQ ID NO: 128622 - DNA, 38 bp, Artificial Sequence
  primer
gtaaaacgacggccagtgtccacaaacaccacaggaag

SEQ ID NO: 128623 - DNA, 20 bp, Artificial Sequence
  primer
cttcactgcgggacacagac

SEQ ID NO: 128624 - DNA, 19 bp, Artificial Sequence
  primer
tctgtccctcatgggatgg

SEQ ID NO: 128625 - DNA, 38 bp, Artificial Sequence
  primer
gtaaaacgacggccagtatccacagtcaggaaaggacc

SEQ ID NO: 128626 - DNA, 21 bp, Artificial Sequence
  primer
gtcctcaagcgatcctattgc

SEQ ID NO: 128627 - DNA, 21 bp, Artificial Sequence
  primer
ccacataactttgcgacgatg

SEQ ID NO: 128628 - DNA, 38 bp, Artificial Sequence
  primer
gtaaaacgacggccagttaagccctgagctctcctctc

SEQ ID NO: 128629 - DNA, 38 bp, Artificial Sequence
  primer
gtaaaacgacggccagttttctgtcccttcagccactc

SEQ ID NO: 128630 - DNA, 23 bp, Artificial Sequence
  primer
cccatcttcagagggttactttc

SEQ ID NO: 128631 - DNA, 21 bp, Artificial Sequence
  primer
tgtggctctgccttacagaag

SEQ ID NO: 128632 - DNA, 37 bp, Artificial Sequence
  primer
gtaaaacgacggccagtcttgacctaggcgcaatcag

SEQ ID NO: 128633 - DNA, 21 bp, Artificial Sequence
  primer
cagcatctcgttgcctgttac

SEQ ID NO: 128634 - DNA, 37 bp, Artificial Sequence
  primer
gtaaaacgacggccagtggtgatctgcctgccttagc

SEQ ID NO: 128635 - DNA, 20 bp, Artificial Sequence
  primer
gcagggagaacagacaggtg

SEQ ID NO: 128636 - DNA, 19 bp, Artificial Sequence
  primer
gtcgtagtcggcgtccatc

SEQ ID NO: 128637 - DNA, 38 bp, Artificial Sequence
  primer
gtaaaacgacggccagttccaggtactcctcgaacgtc

SEQ ID NO: 128638 - DNA, 38 bp, Artificial Sequence
  primer
gtaaaacgacggccagtgactcagggccagctttctac

SEQ ID NO: 128639 - DNA, 22 bp, Artificial Sequence
  primer
cagagtgacttgaagacctgcc

SEQ ID NO: 128640 - DNA, 20 bp, Artificial Sequence
  primer
atgcaacaagaggttgacgg

SEQ ID NO: 128641 - DNA, 38 bp, Artificial Sequence
  primer
gtaaaacgacggccagtagtacttgtgggtgcgagacc

SEQ ID NO: 128642 - DNA, 21 bp, Artificial Sequence
  primer
gtcctcaagcgatcctattgc

SEQ ID NO: 128643 - DNA, 21 bp, Artificial Sequence
  primer
acctttcgtcaaagctgaagg

SEQ ID NO: 128644 - DNA, 21 bp, Artificial Sequence
  primer
ttcttaccagggatggtgtgg

SEQ ID NO: 128645 - DNA, 41 bp, Artificial Sequence
  primer
gtaaaacgacggccagtcccaaggaagttatttgttaaacc

SEQ ID NO: 128646 - DNA, 20 bp, Artificial Sequence
  primer
tcaagcgattctcccatgtc

SEQ ID NO: 128647 - DNA, 39 bp, Artificial Sequence
  primer
gtaaaacgacggccagtttaaagggtagcattccctcag

SEQ ID NO: 128648 - DNA, 37 bp, Artificial Sequence
  primer
gtaaaacgacggccagtagtctgggcgacagagtgag

SEQ ID NO: 128649 - DNA, 21 bp, Artificial Sequence
  primer
ctacttggctgaaacattggg

SEQ ID NO: 128650 - DNA, 42 bp, Artificial Sequence
  primer
gtaaaacgacggccagtggtggaaacatttcatctcactttc

SEQ ID NO: 128651 - DNA, 22 bp, Artificial Sequence
  primer
tggctctagcctattctcttcc

SEQ ID NO: 128652 - DNA, 38 bp, Artificial Sequence
  primer
gtaaaacgacggccagttgggatttgaacttaggcagc

SEQ ID NO: 128653 - DNA, 27 bp, Artificial Sequence
  primer
caatatctttgacaaccaaactaaacc

SEQ ID NO: 128654 - DNA, 25 bp, Artificial Sequence
  primer
cactagcaatttaatagggaacagc

SEQ ID NO: 128655 - DNA, 38 bp, Artificial Sequence
  primer
gtaaaacgacggccagtctggaagcaagaacccttctg

SEQ ID NO: 128656 - DNA, 40 bp, Artificial Sequence
  primer
gtaaaacgacggccagtccacataaacacactaaggcacg

SEQ ID NO: 128657 - DNA, 21 bp, Artificial Sequence
  primer
gtggaagaatcaccgcctaag

SEQ ID NO: 128658 - DNA, 38 bp, Artificial Sequence
  primer
gtaaaacgacggccagtcgactttgcagagaacagagg

SEQ ID NO: 128659 - DNA, 21 bp, Artificial Sequence
  primer
gtctaccagatccaacagccc

SEQ ID NO: 128660 - DNA, 39 bp, Artificial Sequence
  primer
gtaaaacgacggccagtcaagcaatcctcctacctcttc

SEQ ID NO: 128661 - DNA, 21 bp, Artificial Sequence
  primer
gccatcattgcatcaccatac

SEQ ID NO: 128662 - DNA, 21 bp, Artificial Sequence
  primer
gaattgaaccctttaggcacg

SEQ ID NO: 128663 - DNA, 21 bp, Artificial Sequence
  primer
actgcacttgagcctaggagg

SEQ ID NO: 128664 - DNA, 37 bp, Artificial Sequence
  primer
gtaaaacgacggccagttgcgtgacggagaaacaaac

SEQ ID NO: 128665 - DNA, 21 bp, Artificial Sequence
  primer
ctctaaagcccagcaggacag

SEQ ID NO: 128666 - DNA, 21 bp, Artificial Sequence
  primer
aatgtgcaccatttcactagg

SEQ ID NO: 128667 - DNA, 35 bp, Artificial Sequence
  primer
gtaaaacgacggccagtcatcctgatggctgggag

SEQ ID NO: 128668 - DNA, 21 bp, Artificial Sequence
  primer
caggcaacaataacatgggac

SEQ ID NO: 128669 - DNA, 21 bp, Artificial Sequence
  primer
ggatgaactggctttagtccc

SEQ ID NO: 128670 - DNA, 38 bp, Artificial Sequence
  primer
gtaaaacgacggccagtaagatgacctactgggttggg

SEQ ID NO: 128671 - DNA, 21 bp, Artificial Sequence
  primer
tttccctattgtttgggatgc

SEQ ID NO: 128672 - DNA, 22 bp, Artificial Sequence
  primer
caacacacctcatttctgttgc

SEQ ID NO: 128673 - DNA, 22 bp, Artificial Sequence
  primer
ttccaagtggcaatattatccg

SEQ ID NO: 128674 - DNA, 21 bp, Artificial Sequence
  primer
ggtgagccgagatcacttcag

SEQ ID NO: 128675 - DNA, 39 bp, Artificial Sequence
  primer
gtaaaacgacggccagtcgcttctgattaaagaccttgc

SEQ ID NO: 128676 - DNA, 19 bp, Artificial Sequence
  primer
caaggctgaggaaggttgg

SEQ ID NO: 128677 - DNA, 38 bp, Artificial Sequence
  primer
gtaaaacgacggccagtattacaggcttgagccaccat

SEQ ID NO: 128678 - DNA, 23 bp, Artificial Sequence
  primer
ccctggctaatgcgttattctac

SEQ ID NO: 128679 - DNA, 21 bp, Artificial Sequence
  primer
acacacacatacccagtgcag

SEQ ID NO: 128680 - DNA, 21 bp, Artificial Sequence
  primer
gcagtgagctatgattgcacc

SEQ ID NO: 128681 - DNA, 22 bp, Artificial Sequence
  primer
tgaggacccagctatcaaactg

SEQ ID NO: 128682 - DNA, 24 bp, Artificial Sequence
  primer
ctttcacactccttgaagtttctg

SEQ ID NO: 128683 - DNA, 23 bp, Artificial Sequence
  primer
tttagaaacatgcaggacacaac

SEQ ID NO: 128684 - DNA, 21 bp, Artificial Sequence
  primer
taaatctcacggaaaggcacc

SEQ ID NO: 128685 - DNA, 21 bp, Artificial Sequence
  primer
tgcttcccaaacatgactctg

SEQ ID NO: 128686 - DNA, 21 bp, Artificial Sequence
  primer
tagggctttactcccgttgtg

SEQ ID NO: 128687 - DNA, 20 bp, Artificial Sequence
  primer
aaacagggtgctacaggtgc

SEQ ID NO: 128688 - DNA, 35 bp, Artificial Sequence
  primer
gtaaaacgacggccagtatcgcacctggccaagac

SEQ ID NO: 128689 - DNA, 41 bp, Artificial Sequence
  primer
gtaaaacgacggccagttcagaaaggcttaatgtcacaatc

SEQ ID NO: 128690 - DNA, 38 bp, Artificial Sequence
  primer
gtaaaacgacggccagtgcacttgctagttcagcatgg

SEQ ID NO: 128691 - DNA, 38 bp, Artificial Sequence
  primer
gtaaaacgacggccagtttaagcctgccaataacaccc

SEQ ID NO: 128692 - DNA, 22 bp, Artificial Sequence
  primer
gctgcagtgagctatgatcttg

SEQ ID NO: 128693 - DNA, 40 bp, Artificial Sequence
  primer
gtaaaacgacggccagtaattccttactactcacccaccc

SEQ ID NO: 128694 - DNA, 20 bp, Artificial Sequence
  primer
gcagaacagcttccagcttc

SEQ ID NO: 128695 - DNA, 40 bp, Artificial Sequence
  primer
gtaaaacgacggccagttgtgtttaggtggcatctaggag

SEQ ID NO: 128696 - DNA, 38 bp, Artificial Sequence
  primer
gtaaaacgacggccagtaaacagggatggagggttaag

SEQ ID NO: 128697 - DNA, 21 bp, Artificial Sequence
  primer
gaaagtttacgggtttgcgac

SEQ ID NO: 128698 - DNA, 21 bp, Artificial Sequence
  primer
tgccaagcaccttctagtcac

SEQ ID NO: 128699 - DNA, 38 bp, Artificial Sequence
  primer
gtaaaacgacggccagtcacgatcaaagtccttcatgc

SEQ ID NO: 128700 - DNA, 21 bp, Artificial Sequence
  primer
tgtgggcctatttgagaggta

SEQ ID NO: 128701 - DNA, 37 bp, Artificial Sequence
  primer
gtaaaacgacggccagttctctgaggaagcacccaac

SEQ ID NO: 128702 - DNA, 26 bp, Artificial Sequence
  primer
ttctttaaatctgaaatgtacatggg

SEQ ID NO: 128703 - DNA, 22 bp, Artificial Sequence
  primer
ggtttgcactggttgaaatagc

SEQ ID NO: 128704 - DNA, 21 bp, Artificial Sequence
  primer
acatggtcattggcataggtg

SEQ ID NO: 128705 - DNA, 35 bp, Artificial Sequence
  primer
gtaaaacgacggccagtaaatggattggacgcagc

SEQ ID NO: 128706 - DNA, 21 bp, Artificial Sequence
  primer
gctgtgaacacggtattctgg

SEQ ID NO: 128707 - DNA, 21 bp, Artificial Sequence
  primer
tacctccagagatcagccacc

SEQ ID NO: 128708 - DNA, 21 bp, Artificial Sequence
  primer
gtgatccacgtgagtgaaacg

SEQ ID NO: 128709 - DNA, 21 bp, Artificial Sequence
  primer
tgaccacagaatcttggcaac

SEQ ID NO: 128710 - DNA, 38 bp, Artificial Sequence
  primer
gtaaaacgacggccagtctggacactcaatgccaactg

SEQ ID NO: 128711 - DNA, 21 bp, Artificial Sequence
  primer
ttattctccaactccatgggc

SEQ ID NO: 128712 - DNA, 37 bp, Artificial Sequence
  primer
gtaaaacgacggccagtctaccacacggtagccaagc

SEQ ID NO: 128713 - DNA, 21 bp, Artificial Sequence
  primer
aatgcccttcagagagcagag

SEQ ID NO: 128714 - DNA, 41 bp, Artificial Sequence
  primer
gtaaaacgacggccagttgccttggatacaattaagtctcc

SEQ ID NO: 128715 - DNA, 22 bp, Artificial Sequence
  primer
gaagctttcggcctactctacc

SEQ ID NO: 128716 - DNA, 25 bp, Artificial Sequence
  primer
tcttaaagcctggagtagaggaatg

SEQ ID NO: 128717 - DNA, 38 bp, Artificial Sequence
  primer
gtaaaacgacggccagttgcaaagaagtttcatgctgc

SEQ ID NO: 128718 - DNA, 21 bp, Artificial Sequence
  primer
gccaatccatgcctttagttc

SEQ ID NO: 128719 - DNA, 21 bp, Artificial Sequence
  primer
tgccatgccttgttaggatag

SEQ ID NO: 128720 - DNA, 22 bp, Artificial Sequence
  primer
ctagcatcacaggacactggag

SEQ ID NO: 128721 - DNA, 24 bp, Artificial Sequence
  primer
caggttaaattagatttcctcggg

SEQ ID NO: 128722 - DNA, 37 bp, Artificial Sequence
  primer
gtaaaacgacggccagtttcaggacacacctgcactg

SEQ ID NO: 128723 - DNA, 21 bp, Artificial Sequence
  primer
acttggcagtggtttaatggc

SEQ ID NO: 128724 - DNA, 37 bp, Artificial Sequence
  primer
gtaaaacgacggccagttcctgctccaagatttgctg

SEQ ID NO: 128725 - DNA, 22 bp, Artificial Sequence
  primer
tgtgcctctgtgtcctctacac

SEQ ID NO: 128726 - DNA, 22 bp, Artificial Sequence
  primer
tggcttgagcaaataaaggttg

SEQ ID NO: 128727 - DNA, 18 bp, Artificial Sequence
  primer
ccagcatgggcaacagag

SEQ ID NO: 128728 - DNA, 21 bp, Artificial Sequence
  primer
aactgagggcatcttgaggtc

SEQ ID NO: 128729 - DNA, 38 bp, Artificial Sequence
  primer
gtaaaacgacggccagtatcagtcaccaccagaccatc

SEQ ID NO: 128730 - DNA, 21 bp, Artificial Sequence
  primer
ctggatcctcctttcttcctg

SEQ ID NO: 128731 - DNA, 38 bp, Artificial Sequence
  primer
gtaaaacgacggccagtgtcaatgactttcccaccacc

SEQ ID NO: 128732 - DNA, 38 bp, Artificial Sequence
  primer
gtaaaacgacggccagtcgcagtagctcaggagaggag

SEQ ID NO: 128733 - DNA, 38 bp, Artificial Sequence
  primer
gtaaaacgacggccagtaattacaggcatgcgctactg

SEQ ID NO: 128734 - DNA, 21 bp, Artificial Sequence
  primer
ttctgaagggtcttcggtttg

SEQ ID NO: 128735 - DNA, 36 bp, Artificial Sequence
  primer
gtaaaacgacggccagtgtttgggtgcctcatcctc

SEQ ID NO: 128736 - DNA, 21 bp, Artificial Sequence
  primer
actcagggaggatgaggagtg

SEQ ID NO: 128737 - DNA, 19 bp, Artificial Sequence
  primer
actggagccctgacattgc

SEQ ID NO: 128738 - DNA, 18 bp, Artificial Sequence
  primer
ccgggtcccagcctctac

SEQ ID NO: 128739 - DNA, 35 bp, Artificial Sequence
  primer
gtaaaacgacggccagtgctgcctccacccaagtg

SEQ ID NO: 128740 - DNA, 21 bp, Artificial Sequence
  primer
gtagctctggcaattggaatg

SEQ ID NO: 128741 - DNA, 38 bp, Artificial Sequence
  primer
gtaaaacgacggccagtcatgcaagtacgcaaagatgg

SEQ ID NO: 128742 - DNA, 44 bp, Artificial Sequence
  primer
gtaaaacgacggccagtaacttaagaaatcattagatgctaccg

SEQ ID NO: 128743 - DNA, 45 bp, Artificial Sequence
  primer
gtaaaacgacggccagttcattctatagacgctttacaacaagta

SEQ ID NO: 128744 - DNA, 21 bp, Artificial Sequence
  primer
taatccttcccatccctgttg

SEQ ID NO: 128745 - DNA, 21 bp, Artificial Sequence
  primer
aagccaacctgcttaatggtg

SEQ ID NO: 128746 - DNA, 21 bp, Artificial Sequence
  primer
atcgttctggcctttcaactc

SEQ ID NO: 128747 - DNA, 40 bp, Artificial Sequence
  primer
gtaaaacgacggccagtcctctgaatcattccaatctagc

SEQ ID NO: 128748 - DNA, 22 bp, Artificial Sequence
  primer
tgttcaggcagatctagggttt

SEQ ID NO: 128749 - DNA, 41 bp, Artificial Sequence
  primer
gtaaaacgacggccagttgacagaactctcaagcaagtcag

SEQ ID NO: 128750 - DNA, 38 bp, Artificial Sequence
  primer
gtaaaacgacggccagttacatgtccaagatcgcatgg

SEQ ID NO: 128751 - DNA, 21 bp, Artificial Sequence
  primer
cctctttctcgttccacttgc

SEQ ID NO: 128752 - DNA, 43 bp, Artificial Sequence
  primer
gtaaaacgacggccagtaagagcattatggcaaatttattgac

SEQ ID NO: 128753 - DNA, 41 bp, Artificial Sequence
  primer
gtaaaacgacggccagttttcagattaacaggatgaaacca

SEQ ID NO: 128754 - DNA, 21 bp, Artificial Sequence
  primer
ctgtgcaagggtgagtttcag

SEQ ID NO: 128755 - DNA, 41 bp, Artificial Sequence
  primer
gtaaaacgacggccagtgcatcgcaataatttctgtatgtc

SEQ ID NO: 128756 - DNA, 38 bp, Artificial Sequence
  primer
gtaaaacgacggccagtgcctgcaagaatatttgccac

SEQ ID NO: 128757 - DNA, 38 bp, Artificial Sequence
  primer
gtaaaacgacggccagttccttcccatgagattccttg

SEQ ID NO: 128758 - DNA, 23 bp, Artificial Sequence
  primer
gcacaaagtgaaacaatatgctg

SEQ ID NO: 128759 - DNA, 22 bp, Artificial Sequence
  primer
aaatgttccagaacaatgcacc

SEQ ID NO: 128760 - DNA, 40 bp, Artificial Sequence
  primer
gtaaaacgacggccagtttcttcatcattagccatagggt

SEQ ID NO: 128761 - DNA, 23 bp, Artificial Sequence
  primer
tcagtatgctcagcagaaagaaa

SEQ ID NO: 128762 - DNA, 25 bp, Artificial Sequence
  primer
aaagttgttccaagtcattctaacc

SEQ ID NO: 128763 - DNA, 43 bp, Artificial Sequence
  primer
gtaaaacgacggccagtgaaagcaaagttagtagggtgaactc

SEQ ID NO: 128764 - DNA, 38 bp, Artificial Sequence
  primer
gtaaaacgacggccagtactgcagatcacatcacccag

SEQ ID NO: 128765 - DNA, 40 bp, Artificial Sequence
  primer
gtaaaacgacggccagttggaaatcaataagtttatgccc

SEQ ID NO: 128766 - DNA, 38 bp, Artificial Sequence
  primer
gtaaaacgacggccagtatttgagaacaggcaacatgg

SEQ ID NO: 128767 - DNA, 21 bp, Artificial Sequence
  primer
ttagtgaacagcaaagctggg

SEQ ID NO: 128768 - DNA, 37 bp, Artificial Sequence
  primer
gtaaaacgacggccagtatagggcaggactccttggg

SEQ ID NO: 128769 - DNA, 26 bp, Artificial Sequence
  primer
ttgaagagtcaatactttcccaaatc

SEQ ID NO: 128770 - DNA, 21 bp, Artificial Sequence
  primer
tcaaactccacttcaaggtcc

SEQ ID NO: 128771 - DNA, 38 bp, Artificial Sequence
  primer
gtaaaacgacggccagtcaaagaaaggcaacatcatcc

SEQ ID NO: 128772 - DNA, 37 bp, Artificial Sequence
  primer
gtaaaacgacggccagtccgaagtcagcttcatctgg

SEQ ID NO: 128773 - DNA, 19 bp, Artificial Sequence
  primer
gctgggaccagaaatcagc

SEQ ID NO: 128774 - DNA, 21 bp, Artificial Sequence
  primer
caggagcaacaacaaagcaag

SEQ ID NO: 128775 - DNA, 21 bp, Artificial Sequence
  primer
tcatccattccagcagtcttc

SEQ ID NO: 128776 - DNA, 39 bp, Artificial Sequence
  primer
gtaaaacgacggccagtaagaatggcagctgtagaggtc

SEQ ID NO: 128777 - DNA, 38 bp, Artificial Sequence
  primer
gtaaaacgacggccagttcacagcctctctgaaagcac

SEQ ID NO: 128778 - DNA, 20 bp, Artificial Sequence
  primer
ttccctttaagcccaaatgc

SEQ ID NO: 128779 - DNA, 38 bp, Artificial Sequence
  primer
gtaaaacgacggccagtcaagacgcccaataatggtaa

SEQ ID NO: 128780 - DNA, 22 bp, Artificial Sequence
  primer
gccacacagcatggctatattc

SEQ ID NO: 128781 - DNA, 25 bp, Artificial Sequence
  primer
tttcactagaaacacaataccaccc

SEQ ID NO: 128782 - DNA, 39 bp, Artificial Sequence
  primer
gtaaaacgacggccagtcagtcggcatactttcactctg

SEQ ID NO: 128783 - DNA, 38 bp, Artificial Sequence
  primer
gtaaaacgacggccagtcccaaagcagagaaatgcttg

SEQ ID NO: 128784 - DNA, 18 bp, Artificial Sequence
  primer
ggtgtggcctgccaaagt

SEQ ID NO: 128785 - DNA, 21 bp, Artificial Sequence
  primer
ttgaagcaaaggaaagccatc

SEQ ID NO: 128786 - DNA, 38 bp, Artificial Sequence
  primer
gtaaaacgacggccagtgtccaaaggaatggtgaggag

SEQ ID NO: 128787 - DNA, 37 bp, Artificial Sequence
  primer
gtaaaacgacggccagtcaccatgcccagctacaatc

SEQ ID NO: 128788 - DNA, 25 bp, Artificial Sequence
  primer
ggagactgaaccagattactgtgtg

SEQ ID NO: 128789 - DNA, 38 bp, Artificial Sequence
  primer
gtaaaacgacggccagtagaagctcccagcaatcagac

SEQ ID NO: 128790 - DNA, 38 bp, Artificial Sequence
  primer
gtaaaacgacggccagttgggcagaaatgtaggtagcc

SEQ ID NO: 128791 - DNA, 21 bp, Artificial Sequence
  primer
gggcatgcaattccagtaaag

SEQ ID NO: 128792 - DNA, 36 bp, Artificial Sequence
  primer
gtaaaacgacggccagtgggcctgaatgtgcctaac

SEQ ID NO: 128793 - DNA, 38 bp, Artificial Sequence
  primer
gtaaaacgacggccagtgtgggtttgtaggaggagagg

SEQ ID NO: 128794 - DNA, 25 bp, Artificial Sequence
  primer
ggttgacaaaccctagcttaaagaa

SEQ ID NO: 128795 - DNA, 38 bp, Artificial Sequence
  primer
gtaaaacgacggccagttcctacttctggcactccaca

SEQ ID NO: 128796 - DNA, 44 bp, Artificial Sequence
  primer
gtaaaacgacggccagttcacaaacctttcataactatattccc

SEQ ID NO: 128797 - DNA, 40 bp, Artificial Sequence
  primer
gtaaaacgacggccagtggaaacatatggtccagaagaaa

SEQ ID NO: 128798 - DNA, 44 bp, Artificial Sequence
  primer
gtaaaacgacggccagttctattctaagcttcagatttgtttca

SEQ ID NO: 128799 - DNA, 40 bp, Artificial Sequence
  primer
gtaaaacgacggccagttgccaaattacaaatgtatccaa

SEQ ID NO: 128800 - DNA, 21 bp, Artificial Sequence
  primer
aatatctgggttgggaaaggg

SEQ ID NO: 128801 - DNA, 40 bp, Artificial Sequence
  primer
gtaaaacgacggccagtaatgcaaatgcactgaacttagg

SEQ ID NO: 128802 - DNA, 38 bp, Artificial Sequence
  primer
gtaaaacgacggccagtctttatcaatgcctcgccttc

SEQ ID NO: 128803 - DNA, 18 bp, Artificial Sequence
  primer
gagccgacattgcaccac

SEQ ID NO: 128804 - DNA, 21 bp, Artificial Sequence
  primer
gatgctttgcatcacgatttc

SEQ ID NO: 128805 - DNA, 38 bp, Artificial Sequence
  primer
gtaaaacgacggccagtttctttcattgcttctgtccc

SEQ ID NO: 128806 - DNA, 38 bp, Artificial Sequence
  primer
gtaaaacgacggccagttgaagtgagaaatgctgaccc

SEQ ID NO: 128807 - DNA, 21 bp, Artificial Sequence
  primer
ccatcagtagcctccagatcc

SEQ ID NO: 128808 - DNA, 21 bp, Artificial Sequence
  primer
gccagaatatccttccagcac

SEQ ID NO: 128809 - DNA, 18 bp, Artificial Sequence
  primer
ctgttgggatgccattcg

SEQ ID NO: 128810 - DNA, 36 bp, Artificial Sequence
  primer
gtaaaacgacggccagtagtggtgttgagtgggtgc

SEQ ID NO: 128811 - DNA, 38 bp, Artificial Sequence
  primer
gtaaaacgacggccagttaagggacacattgacagccc

SEQ ID NO: 128812 - DNA, 19 bp, Artificial Sequence
  primer
ctcaggaggcagaggaagg

SEQ ID NO: 128813 - DNA, 23 bp, Artificial Sequence
  primer
ttctactactgcaggcaaacagc

SEQ ID NO: 128814 - DNA, 41 bp, Artificial Sequence
  primer
gtaaaacgacggccagtcaaagggctactttatttcattgg

SEQ ID NO: 128815 - DNA, 38 bp, Artificial Sequence
  primer
gtaaaacgacggccagtgaatgccactttcagttccag

SEQ ID NO: 128816 - DNA, 39 bp, Artificial Sequence
  primer
gtaaaacgacggccagtccaagaaatgatggatacaggg

SEQ ID NO: 128817 - DNA, 38 bp, Artificial Sequence
  primer
gtaaaacgacggccagtgccaagcactgttctccatac

SEQ ID NO: 128818 - DNA, 43 bp, Artificial Sequence
  primer
gtaaaacgacggccagttgattacaagttggagtagaatgctc

SEQ ID NO: 128819 - DNA, 41 bp, Artificial Sequence
  primer
gtaaaacgacggccagtaaagccaaagggagatttagagaa

SEQ ID NO: 128820 - DNA, 38 bp, Artificial Sequence
  primer
gtaaaacgacggccagtgcatgtgagcaaggacaattc

SEQ ID NO: 128821 - DNA, 18 bp, Artificial Sequence
  primer
gtcagggatcgggtttcg

SEQ ID NO: 128822 - DNA, 21 bp, Artificial Sequence
  primer
aagatgaaactgtgctgcgac

SEQ ID NO: 128823 - DNA, 37 bp, Artificial Sequence
  primer
gtaaaacgacggccagtcagggaagcaaagcattctg

SEQ ID NO: 128824 - DNA, 38 bp, Artificial Sequence
  primer
gtaaaacgacggccagttgcacctgtcaactatgcctg

SEQ ID NO: 128825 - DNA, 38 bp, Artificial Sequence
  primer
gtaaaacgacggccagtcagcagggcagttaactctgg

SEQ ID NO: 128826 - DNA, 21 bp, Artificial Sequence
  primer
atcgttgggagtacaaagggc

SEQ ID NO: 128827 - DNA, 38 bp, Artificial Sequence
  primer
gtaaaacgacggccagtggattggctcggaatttcttc

SEQ ID NO: 128828 - DNA, 38 bp, Artificial Sequence
  primer
gtaaaacgacggccagtagctgacctacaaggcagagg

SEQ ID NO: 128829 - DNA, 38 bp, Artificial Sequence
  primer
gtaaaacgacggccagtgtcctctggaagataccgtgg

SEQ ID NO: 128830 - DNA, 23 bp, Artificial Sequence
  primer
aaactccacagagctgcatacac

SEQ ID NO: 128831 - DNA, 21 bp, Artificial Sequence
  primer
ggctgatatgatgaagccaac

SEQ ID NO: 128832 - DNA, 26 bp, Artificial Sequence
  primer
tgtctttaagaaatctgttattctgc

SEQ ID NO: 128833 - DNA, 38 bp, Artificial Sequence
  primer
gtaaaacgacggccagtttctaaacacaaatgcggctg

SEQ ID NO: 128834 - DNA, 21 bp, Artificial Sequence
  primer
ccaacctggagacctttcatc

SEQ ID NO: 128835 - DNA, 20 bp, Artificial Sequence
  primer
gctgggttcagttccttgtg

SEQ ID NO: 128836 - DNA, 21 bp, Artificial Sequence
  primer
ctaaagacacggaaatgcacc

SEQ ID NO: 128837 - DNA, 21 bp, Artificial Sequence
  primer
aagaggcacaacacgataccc

SEQ ID NO: 128838 - DNA, 42 bp, Artificial Sequence
  primer
gtaaaacgacggccagtccctcctcctgttaggttaaataag

SEQ ID NO: 128839 - DNA, 24 bp, Artificial Sequence
  primer
ggttgtaaagtcatggcatgtatc

SEQ ID NO: 128840 - DNA, 39 bp, Artificial Sequence
  primer
gtaaaacgacggccagtcgtttaacaaatgctttctggc

SEQ ID NO: 128841 - DNA, 19 bp, Artificial Sequence
  primer
atagcggacacgcataggg

SEQ ID NO: 128842 - DNA, 20 bp, Artificial Sequence
  primer
gtgcttgcggaacactgaag

SEQ ID NO: 128843 - DNA, 21 bp, Artificial Sequence
  primer
ttcccattggctcactttacc

SEQ ID NO: 128844 - DNA, 21 bp, Artificial Sequence
  primer
aacgtcttgtcacattgcagg

SEQ ID NO: 128845 - DNA, 38 bp, Artificial Sequence
  primer
gtaaaacgacggccagtacaccacaaaggatttcccac

SEQ ID NO: 128846 - DNA, 38 bp, Artificial Sequence
  primer
gtaaaacgacggccagtagcgtcattgtggagaaggtc

SEQ ID NO: 128847 - DNA, 38 bp, Artificial Sequence
  primer
gtaaaacgacggccagtaagtcgctggcactcaagaag

SEQ ID NO: 128848 - DNA, 37 bp, Artificial Sequence
  primer
gtaaaacgacggccagtagctctcttagctggccgac

SEQ ID NO: 128849 - DNA, 38 bp, Artificial Sequence
  primer
gtaaaacgacggccagtacatagttgtgctggcaatgg

SEQ ID NO: 128850 - DNA, 21 bp, Artificial Sequence
  primer
tcttctgcaaattcttccacg

SEQ ID NO: 128851 - DNA, 37 bp, Artificial Sequence
  primer
gtaaaacgacggccagttacctgccaggaaactgctc

SEQ ID NO: 128852 - DNA, 39 bp, Artificial Sequence
  primer
gtaaaacgacggccagttcagtgcttcaattccatgaac

SEQ ID NO: 128853 - DNA, 38 bp, Artificial Sequence
  primer
gtaaaacgacggccagttttggaagaaatgcacaagtt

SEQ ID NO: 128854 - DNA, 40 bp, Artificial Sequence
  primer
gtaaaacgacggccagtcctggaaatttaacgactgtgtg

SEQ ID NO: 128855 - DNA, 38 bp, Artificial Sequence
  primer
gtaaaacgacggccagtcaagtttgaagccttgtcctg

SEQ ID NO: 128856 - DNA, 38 bp, Artificial Sequence
  primer
gtaaaacgacggccagtagcaaacattcctgaaagtgc

SEQ ID NO: 128857 - DNA, 20 bp, Artificial Sequence
  primer
gagctcaaatggcaccactg

SEQ ID NO: 128858 - DNA, 37 bp, Artificial Sequence
  primer
gtaaaacgacggccagtaggtgatccacctgcttcag

SEQ ID NO: 128859 - DNA, 38 bp, Artificial Sequence
  primer
gtaaaacgacggccagtaggttcctatgcttcatggtg

SEQ ID NO: 128860 - DNA, 38 bp, Artificial Sequence
  primer
gtaaaacgacggccagtccctgcagataaacgggaata

SEQ ID NO: 128861 - DNA, 39 bp, Artificial Sequence
  primer
gtaaaacgacggccagttggcgatttgcttcagtattag

SEQ ID NO: 128862 - DNA, 21 bp, Artificial Sequence
  primer
ggccatttgacacaaggtaac

SEQ ID NO: 128863 - DNA, 37 bp, Artificial Sequence
  primer
gtaaaacgacggccagtccactgaagagcaatggatg

SEQ ID NO: 128864 - DNA, 21 bp, Artificial Sequence
  primer
ttcatggcaacaccagtcttc

SEQ ID NO: 128865 - DNA, 24 bp, Artificial Sequence
  primer
cagagaaggctgtatgtcaagagg

SEQ ID NO: 128866 - DNA, 25 bp, Artificial Sequence
  primer
tgtgtctgttagtcttaagccagag

SEQ ID NO: 128867 - DNA, 40 bp, Artificial Sequence
  primer
gtaaaacgacggccagtgagaacaaagtccaatggtcatc

SEQ ID NO: 128868 - DNA, 38 bp, Artificial Sequence
  primer
gtaaaacgacggccagtatcgtgacaatctgatgcgac

SEQ ID NO: 128869 - DNA, 27 bp, Artificial Sequence
  primer
ttgtaagtacacaagcagtaacaggag

SEQ ID NO: 128870 - DNA, 42 bp, Artificial Sequence
  primer
gtaaaacgacggccagtgaaggtacatagccttcattaagca

SEQ ID NO: 128871 - DNA, 35 bp, Artificial Sequence
  primer
gtaaaacgacggccagtcgtttcaggaggctgagg

SEQ ID NO: 128872 - DNA, 43 bp, Artificial Sequence
  primer
gtaaaacgacggccagttttggatgctttatcttggttactac

SEQ ID NO: 128873 - DNA, 42 bp, Artificial Sequence
  primer
gtaaaacgacggccagttgtgtattactgcaaacaggtgaac

SEQ ID NO: 128874 - DNA, 21 bp, Artificial Sequence
  primer
aagtgttgaggaaagggctcc

SEQ ID NO: 128875 - DNA, 38 bp, Artificial Sequence
  primer
gtaaaacgacggccagtggcaaacatacatatccgtcc

SEQ ID NO: 128876 - DNA, 21 bp, Artificial Sequence
  primer
ttaaagcaaacgtcatcaggc

SEQ ID NO: 128877 - DNA, 38 bp, Artificial Sequence
  primer
gtaaaacgacggccagtaacctaggcccactgacttcc

SEQ ID NO: 128878 - DNA, 21 bp, Artificial Sequence
  primer
cctgttctgtgtgggtctgag

SEQ ID NO: 128879 - DNA, 38 bp, Artificial Sequence
  primer
gtaaaacgacggccagttgtgtctgtatgaggcttccc

SEQ ID NO: 128880 - DNA, 38 bp, Artificial Sequence
  primer
gtaaaacgacggccagtactaacctcagcaggcaaagc

SEQ ID NO: 128881 - DNA, 38 bp, Artificial Sequence
  primer
gtaaaacgacggccagtcagtagcctcctgtctggctc

SEQ ID NO: 128882 - DNA, 21 bp, Artificial Sequence
  primer
tgtggtctttggaacatcctg

SEQ ID NO: 128883 - DNA, 38 bp, Artificial Sequence
  primer
gtaaaacgacggccagtccaacagcctttctaaccagg

SEQ ID NO: 128884 - DNA, 20 bp, Artificial Sequence
  primer
caacaggctctgctcaaagg

SEQ ID NO: 128885 - DNA, 21 bp, Artificial Sequence
  primer
gctttgaaatatgcgtccctc

SEQ ID NO: 128886 - DNA, 20 bp, Artificial Sequence
  primer
caccatccatggagaaatcg

SEQ ID NO: 128887 - DNA, 38 bp, Artificial Sequence
  primer
gtaaaacgacggccagtcatcctgaaagacaggtgtgc

SEQ ID NO: 128888 - DNA, 38 bp, Artificial Sequence
  primer
gtaaaacgacggccagttacccatctcaggtcttggtg

SEQ ID NO: 128889 - DNA, 21 bp, Artificial Sequence
  primer
gagccagaaatcagtcttggg

SEQ ID NO: 128890 - DNA, 21 bp, Artificial Sequence
  primer
tgggacacctgacacaaagtc

SEQ ID NO: 128891 - DNA, 21 bp, Artificial Sequence
  primer
ggtactccagcagctaccacc

SEQ ID NO: 128892 - DNA, 21 bp, Artificial Sequence
  primer
aggcttgttattgtcacaccg

SEQ ID NO: 128893 - DNA, 20 bp, Artificial Sequence
  primer
gactaagttggttggcagcg

SEQ ID NO: 128894 - DNA, 38 bp, Artificial Sequence
  primer
gtaaaacgacggccagtcctcagaaagaggagagcagg

SEQ ID NO: 128895 - DNA, 38 bp, Artificial Sequence
  primer
gtaaaacgacggccagtcaagaatgaactcggctctcc

SEQ ID NO: 128896 - DNA, 21 bp, Artificial Sequence
  primer
ctcagcctttcctgatatccc

SEQ ID NO: 128897 - DNA, 21 bp, Artificial Sequence
  primer
acatgctgcactcgtaccttg

SEQ ID NO: 128898 - DNA, 21 bp, Artificial Sequence
  primer
taggcacggaccatgttgtag

SEQ ID NO: 128899 - DNA, 21 bp, Artificial Sequence
  primer
ctctccagcagacacatgctc

SEQ ID NO: 128900 - DNA, 21 bp, Artificial Sequence
  primer
ggaacaggtaggatgaggcag

SEQ ID NO: 128901 - DNA, 37 bp, Artificial Sequence
  primer
gtaaaacgacggccagtctgacgcccatatttcatgc

SEQ ID NO: 128902 - DNA, 38 bp, Artificial Sequence
  primer
gtaaaacgacggccagttaagggactcagggtaatggg

SEQ ID NO: 128903 - DNA, 20 bp, Artificial Sequence
  primer
gctggtcatccttgtcgaag

SEQ ID NO: 128904 - DNA, 22 bp, Artificial Sequence
  primer
gcagcatgttctgagaaagagg

SEQ ID NO: 128905 - DNA, 38 bp, Artificial Sequence
  primer
gtaaaacgacggccagtagggtagagcttgtggcagag

SEQ ID NO: 128906 - DNA, 21 bp, Artificial Sequence
  primer
aggacttgtagtggtgggagg

SEQ ID NO: 128907 - DNA, 38 bp, Artificial Sequence
  primer
gtaaaacgacggccagtgggactacagggaagggagtc

SEQ ID NO: 128908 - DNA, 37 bp, Artificial Sequence
  primer
gtaaaacgacggccagtgctgcgagtcagaccttgtc

SEQ ID NO: 128909 - DNA, 21 bp, Artificial Sequence
  primer
ttctcccaattcacctgttcc

SEQ ID NO: 128910 - DNA, 38 bp, Artificial Sequence
  primer
gtaaaacgacggccagtgatactccattcagcaagggc

SEQ ID NO: 128911 - DNA, 20 bp, Artificial Sequence
  primer
agcatgcagatggcagtagg

SEQ ID NO: 128912 - DNA, 38 bp, Artificial Sequence
  primer
gtaaaacgacggccagtggtgcccagttcgtttatctg

SEQ ID NO: 128913 - DNA, 38 bp, Artificial Sequence
  primer
gtaaaacgacggccagtatcatccgagttcagattccg

SEQ ID NO: 128914 - DNA, 39 bp, Artificial Sequence
  primer
gtaaaacgacggccagtaagggtgggaggacagacttag

SEQ ID NO: 128915 - DNA, 21 bp, Artificial Sequence
  primer
gtttggcagaggtacaccagg

SEQ ID NO: 128916 - DNA, 21 bp, Artificial Sequence
  primer
gagtgaggatgaggtcaaggg

SEQ ID NO: 128917 - DNA, 21 bp, Artificial Sequence
  primer
tcattgctaggaatctgtggg

SEQ ID NO: 128918 - DNA, 21 bp, Artificial Sequence
  primer
cagacacagggctttcaggag

SEQ ID NO: 128919 - DNA, 20 bp, Artificial Sequence
  primer
aacaacagggttgctggatg

SEQ ID NO: 128920 - DNA, 39 bp, Artificial Sequence
  primer
gtaaaacgacggccagtgcatctacaaggttgcatttcc

SEQ ID NO: 128921 - DNA, 22 bp, Artificial Sequence
  primer
aacctcccattacaacacatgg

SEQ ID NO: 128922 - DNA, 21 bp, Artificial Sequence
  primer
tcctactcacgctcactgctc

SEQ ID NO: 128923 - DNA, 21 bp, Artificial Sequence
  primer
tttaaaggcagagaatgtggc

SEQ ID NO: 128924 - DNA, 38 bp, Artificial Sequence
  primer
gtaaaacgacggccagtacctgaagaaagcaaaggacg

SEQ ID NO: 128925 - DNA, 21 bp, Artificial Sequence
  primer
ttccaggacccaggaaattag

SEQ ID NO: 128926 - DNA, 21 bp, Artificial Sequence
  primer
tttccttgatgtcttccctgg

SEQ ID NO: 128927 - DNA, 21 bp, Artificial Sequence
  primer
tgtgtaaagccagtgtctcgg

SEQ ID NO: 128928 - DNA, 21 bp, Artificial Sequence
  primer
ggtcttgggttccgtagactg

SEQ ID NO: 128929 - DNA, 21 bp, Artificial Sequence
  primer
gccttggaggagtctttagcc

SEQ ID NO: 128930 - DNA, 38 bp, Artificial Sequence
  primer
gtaaaacgacggccagtgaacccaaccagaaacattcc

SEQ ID NO: 128931 - DNA, 37 bp, Artificial Sequence
  primer
gtaaaacgacggccagtcgtgaagcagtgtgagcaag

SEQ ID NO: 128932 - DNA, 21 bp, Artificial Sequence
  primer
accgagagattgagtggaagg

SEQ ID NO: 128933 - DNA, 21 bp, Artificial Sequence
  primer
ctcagtgtgggtgtgtcttgc

SEQ ID NO: 128934 - DNA, 38 bp, Artificial Sequence
  primer
gtaaaacgacggccagttcagaggtgttgtagcttgcc

SEQ ID NO: 128935 - DNA, 35 bp, Artificial Sequence
  primer
gtaaaacgacggccagtggtcacgtgaggctggag

SEQ ID NO: 128936 - DNA, 37 bp, Artificial Sequence
  primer
gtaaaacgacggccagttgtcacaattctgccacagg

SEQ ID NO: 128937 - DNA, 21 bp, Artificial Sequence
  primer
ggaagcctactctggaaaggg

SEQ ID NO: 128938 - DNA, 21 bp, Artificial Sequence
  primer
tctgtcatttcctcccgtttc

SEQ ID NO: 128939 - DNA, 21 bp, Artificial Sequence
  primer
gcagtccttggcagctcatag

SEQ ID NO: 128940 - DNA, 38 bp, Artificial Sequence
  primer
gtaaaacgacggccagtctcctccaacaaggctcaaag

SEQ ID NO: 128941 - DNA, 38 bp, Artificial Sequence
  primer
gtaaaacgacggccagtaccatctccctgaacctgaac

SEQ ID NO: 128942 - DNA, 21 bp, Artificial Sequence
  primer
cctctccctttcattcccttc

SEQ ID NO: 128943 - DNA, 21 bp, Artificial Sequence
  primer
gtgctgctccacctcactatg

SEQ ID NO: 128944 - DNA, 21 bp, Artificial Sequence
  primer
ctccggttgataaaggctgac

SEQ ID NO: 128945 - DNA, 21 bp, Artificial Sequence
  primer
aggctgagacagaatggcttg

SEQ ID NO: 128946 - DNA, 38 bp, Artificial Sequence
  primer
gtaaaacgacggccagttctccctctggtacccaacac

SEQ ID NO: 128947 - DNA, 38 bp, Artificial Sequence
  primer
gtaaaacgacggccagtccaggcttagctgtgtcattc

SEQ ID NO: 128948 - DNA, 21 bp, Artificial Sequence
  primer
gatgacttcgagtctggaggg

SEQ ID NO: 128949 - DNA, 20 bp, Artificial Sequence
  primer
gctccgagtctcagtcaccc

SEQ ID NO: 128950 - DNA, 39 bp, Artificial Sequence
  primer
gtaaaacgacggccagtgggagacctgcctgaattctac

SEQ ID NO: 128951 - DNA, 21 bp, Artificial Sequence
  primer
agccattatgtacgatgccac

SEQ ID NO: 128952 - DNA, 21 bp, Artificial Sequence
  primer
aggaacatggctacgtcattg

SEQ ID NO: 128953 - DNA, 21 bp, Artificial Sequence
  primer
ggtaaactcacagagcccagg

SEQ ID NO: 128954 - DNA, 20 bp, Artificial Sequence
  primer
ctgcctgggtgtcttgagtc

SEQ ID NO: 128955 - DNA, 21 bp, Artificial Sequence
  primer
gggcagtgaggaagaagaaac

SEQ ID NO: 128956 - DNA, 37 bp, Artificial Sequence
  primer
gtaaaacgacggccagtcagaaacctgtgggaagctg

SEQ ID NO: 128957 - DNA, 21 bp, Artificial Sequence
  primer
accctttccttcctcacacac

SEQ ID NO: 128958 - DNA, 21 bp, Artificial Sequence
  primer
ttgaacggtctagagcaaccc

SEQ ID NO: 128959 - DNA, 21 bp, Artificial Sequence
  primer
agaagctctgtgtcctccagc

SEQ ID NO: 128960 - DNA, 38 bp, Artificial Sequence
  primer
gtaaaacgacggccagtgcctcccaaggcactagaatc

SEQ ID NO: 128961 - DNA, 38 bp, Artificial Sequence
  primer
gtaaaacgacggccagtgttggacaccataagccacag

SEQ ID NO: 128962 - DNA, 21 bp, Artificial Sequence
  primer
caccacacagctgcttcattc

SEQ ID NO: 128963 - DNA, 21 bp, Artificial Sequence
  primer
gcaaagaggacaaagagaccc

SEQ ID NO: 128964 - DNA, 35 bp, Artificial Sequence
  primer
gtaaaacgacggccagtccctctgctcccaccaag

SEQ ID NO: 128965 - DNA, 20 bp, Artificial Sequence
  primer
gtggcagtctggaaaccctc

SEQ ID NO: 128966 - DNA, 20 bp, Artificial Sequence
  primer
caccaacttgcatctggtcc

SEQ ID NO: 128967 - DNA, 19 bp, Artificial Sequence
  primer
gacccatgcacttcccaac

SEQ ID NO: 128968 - DNA, 21 bp, Artificial Sequence
  primer
gaccagcaggcttagttgtcc

SEQ ID NO: 128969 - DNA, 21 bp, Artificial Sequence
  primer
accttctgggacaggaacaag

SEQ ID NO: 128970 - DNA, 21 bp, Artificial Sequence
  primer
gtggtggtgtagcctggaaac

SEQ ID NO: 128971 - DNA, 42 bp, Artificial Sequence
  primer
gtaaaacgacggccagttggcaaacaggtattagctctagtt

SEQ ID NO: 128972 - DNA, 40 bp, Artificial Sequence
  primer
gtaaaacgacggccagttttggctttaaacatcaagaacc

SEQ ID NO: 128973 - DNA, 21 bp, Artificial Sequence
  primer
aatactcctcctccagggtcc

SEQ ID NO: 128974 - DNA, 42 bp, Artificial Sequence
  primer
gtaaaacgacggccagtcctcatcacttcttatcctcctacc

SEQ ID NO: 128975 - DNA, 38 bp, Artificial Sequence
  primer
gtaaaacgacggccagtcaggagtccttggttagctgc

SEQ ID NO: 128976 - DNA, 21 bp, Artificial Sequence
  primer
aaactacaaatcccaaagggc

SEQ ID NO: 128977 - DNA, 41 bp, Artificial Sequence
  primer
gtaaaacgacggccagtttacaagtcatacactgtcctggg

SEQ ID NO: 128978 - DNA, 21 bp, Artificial Sequence
  primer
tgggacaggattctggttctg

SEQ ID NO: 128979 - DNA, 38 bp, Artificial Sequence
  primer
gtaaaacgacggccagtcacctggacctctactttccg

SEQ ID NO: 128980 - DNA, 38 bp, Artificial Sequence
  primer
gtaaaacgacggccagtcaatgggctcgaaagctacag

SEQ ID NO: 128981 - DNA, 21 bp, Artificial Sequence
  primer
aaagcttcccgtctacacgtc

SEQ ID NO: 128982 - DNA, 21 bp, Artificial Sequence
  primer
cctacctcctttccaaccctc

SEQ ID NO: 128983 - DNA, 38 bp, Artificial Sequence
  primer
gtaaaacgacggccagtcatggcagtcctgtctacacc

SEQ ID NO: 128984 - DNA, 21 bp, Artificial Sequence
  primer
aaacttatcttcccacacggg

SEQ ID NO: 128985 - DNA, 38 bp, Artificial Sequence
  primer
gtaaaacgacggccagtccagtgtgctcttggtcagtg

SEQ ID NO: 128986 - DNA, 21 bp, Artificial Sequence
  primer
aggagccacatgcaacatctc

SEQ ID NO: 128987 - DNA, 39 bp, Artificial Sequence
  primer
gtaaaacgacggccagtggacttagcccaggtctctagg

SEQ ID NO: 128988 - DNA, 18 bp, Artificial Sequence
  primer
tgctctggcctggttctg

SEQ ID NO: 128989 - DNA, 21 bp, Artificial Sequence
  primer
aaggaaaggctcagaaggtgg

SEQ ID NO: 128990 - DNA, 37 bp, Artificial Sequence
  primer
gtaaaacgacggccagtcactgtcttcccagaccagg

SEQ ID NO: 128991 - DNA, 21 bp, Artificial Sequence
  primer
cccagcttcaaatctttctgg

SEQ ID NO: 128992 - DNA, 20 bp, Artificial Sequence
  primer
tattcaagccagcaaccacg

SEQ ID NO: 128993 - DNA, 21 bp, Artificial Sequence
  primer
agatcgccctcgctatacttg

SEQ ID NO: 128994 - DNA, 21 bp, Artificial Sequence
  primer
ccaacactgcgaacatcaaag

SEQ ID NO: 128995 - DNA, 38 bp, Artificial Sequence
  primer
gtaaaacgacggccagtttcattagtgcctggttgtgc

SEQ ID NO: 128996 - DNA, 21 bp, Artificial Sequence
  primer
ttgcttcctgtacttgcttgg

SEQ ID NO: 128997 - DNA, 21 bp, Artificial Sequence
  primer
tgagccacattcaacttccac

SEQ ID NO: 128998 - DNA, 22 bp, Artificial Sequence
  primer
tcttcctcatcaactcctctgc

SEQ ID NO: 128999 - DNA, 21 bp, Artificial Sequence
  primer
aacagcaggtatgtttgtgcc

SEQ ID NO: 129000 - DNA, 38 bp, Artificial Sequence
  primer
gtaaaacgacggccagtgcatagtccctacccttctgg

SEQ ID NO: 129001 - DNA, 37 bp, Artificial Sequence
  primer
gtaaaacgacggccagtgtgtcttcctgagagctggc

SEQ ID NO: 129002 - DNA, 20 bp, Artificial Sequence
  primer
cagagaccactccatcctgc

SEQ ID NO: 129003 - DNA, 39 bp, Artificial Sequence
  primer
gtaaaacgacggccagttctttggtgcatttgttgtttc

SEQ ID NO: 129004 - DNA, 21 bp, Artificial Sequence
  primer
ttatgcgagaagagatggcag

SEQ ID NO: 129005 - DNA, 21 bp, Artificial Sequence
  primer
tacctgggaaactaagggtgc

SEQ ID NO: 129006 - DNA, 21 bp, Artificial Sequence
  primer
ttgcagtaatggacaggcaac

SEQ ID NO: 129007 - DNA, 38 bp, Artificial Sequence
  primer
gtaaaacgacggccagtgacaagctacaggcccttcac

SEQ ID NO: 129008 - DNA, 22 bp, Artificial Sequence
  primer
ggcaacacagatccttacaacc

SEQ ID NO: 129009 - DNA, 21 bp, Artificial Sequence
  primer
aagacgctgagccctgtttag

SEQ ID NO: 129010 - DNA, 21 bp, Artificial Sequence
  primer
ccaaatcgaggaaacatggtc

SEQ ID NO: 129011 - DNA, 38 bp, Artificial Sequence
  primer
gtaaaacgacggccagtttgaaacgccatgtctgtagc

SEQ ID NO: 129012 - DNA, 37 bp, Artificial Sequence
  primer
gtaaaacgacggccagtcaacagccatccttctcagc

SEQ ID NO: 129013 - DNA, 38 bp, Artificial Sequence
  primer
gtaaaacgacggccagtcagaagcaatgacacgaggag

SEQ ID NO: 129014 - DNA, 41 bp, Artificial Sequence
  primer
gtaaaacgacggccagttctagtatcctgaaagtggcattg

SEQ ID NO: 129015 - DNA, 44 bp, Artificial Sequence
  primer
gtaaaacgacggccagtaacttgactgattaaagacatgagtcc

SEQ ID NO: 129016 - DNA, 38 bp, Artificial Sequence
  primer
gtaaaacgacggccagtgacaacccatggctacgaaac

SEQ ID NO: 129017 - DNA, 19 bp, Artificial Sequence
  primer
cacgtgctaccacagccag

SEQ ID NO: 129018 - DNA, 45 bp, Artificial Sequence
  primer
gtaaaacgacggccagttgaagtagtctgaccagtttctgtctaa

SEQ ID NO: 129019 - DNA, 40 bp, Artificial Sequence
  primer
gtaaaacgacggccagttgaagcctcagtttcatagcttc

SEQ ID NO: 129020 - DNA, 19 bp, Artificial Sequence
  primer
gaggaggagggctgcattc

SEQ ID NO: 129021 - DNA, 18 bp, Artificial Sequence
  primer
acaggcatgtgccaccac

SEQ ID NO: 129022 - DNA, 44 bp, Artificial Sequence
  primer
gtaaaacgacggccagttcaagactgtttgtaaagaaattcaag

SEQ ID NO: 129023 - DNA, 39 bp, Artificial Sequence
  primer
gtaaaacgacggccagtctctgattccctaatcactccc

SEQ ID NO: 129024 - DNA, 21 bp, Artificial Sequence
  primer
aggccttataaacctccctga

SEQ ID NO: 129025 - DNA, 21 bp, Artificial Sequence
  primer
agcaacaaggacagcctgata

SEQ ID NO: 129026 - DNA, 40 bp, Artificial Sequence
  primer
gtaaaacgacggccagttggtctattggattggtgtaagg

SEQ ID NO: 129027 - DNA, 21 bp, Artificial Sequence
  primer
tggctcacacttcattgcttg

SEQ ID NO: 129028 - DNA, 21 bp, Artificial Sequence
  primer
aaaggccctatggaatcttgg

SEQ ID NO: 129029 - DNA, 21 bp, Artificial Sequence
  primer
gccattatcagtagtggcacc

SEQ ID NO: 129030 - DNA, 45 bp, Artificial Sequence
  primer
gtaaaacgacggccagtctgaatatcaataatcaatggctaaagt

SEQ ID NO: 129031 - DNA, 43 bp, Artificial Sequence
  primer
gtaaaacgacggccagttctgtgatactgactgcctttaaatc

SEQ ID NO: 129032 - DNA, 39 bp, Artificial Sequence
  primer
gtaaaacgacggccagttgacggtgtctatgagcaacag

SEQ ID NO: 129033 - DNA, 21 bp, Artificial Sequence
  primer
atgcctcccataattggaaag

SEQ ID NO: 129034 - DNA, 39 bp, Artificial Sequence
  primer
gtaaaacgacggccagtttgttaattgatgggaaggagg

SEQ ID NO: 129035 - DNA, 22 bp, Artificial Sequence
  primer
cagccttaatttctgtgaaggg

SEQ ID NO: 129036 - DNA, 25 bp, Artificial Sequence
  primer
ttgaggatccgtacacaattaaact

SEQ ID NO: 129037 - DNA, 21 bp, Artificial Sequence
  primer
gggaatgctaaacaaacaggc

SEQ ID NO: 129038 - DNA, 20 bp, Artificial Sequence
  primer
gggagacgaagagtgactgc

SEQ ID NO: 129039 - DNA, 21 bp, Artificial Sequence
  primer
aaccagaaagcagtcctcacc

SEQ ID NO: 129040 - DNA, 21 bp, Artificial Sequence
  primer
tccctgaatgccctttcttag

SEQ ID NO: 129041 - DNA, 21 bp, Artificial Sequence
  primer
tttctgcactggcagacattc

SEQ ID NO: 129042 - DNA, 38 bp, Artificial Sequence
  primer
gtaaaacgacggccagtgggatgacatctgattgaagg

SEQ ID NO: 129043 - DNA, 43 bp, Artificial Sequence
  primer
gtaaaacgacggccagtggattctctaaatggtgacttctttg

SEQ ID NO: 129044 - DNA, 21 bp, Artificial Sequence
  primer
ataagggatgaatgccgattg

SEQ ID NO: 129045 - DNA, 21 bp, Artificial Sequence
  primer
cgtgtgagagatattcggtgg

SEQ ID NO: 129046 - DNA, 38 bp, Artificial Sequence
  primer
gtaaaacgacggccagtgctaaatgccttcccacattc

SEQ ID NO: 129047 - DNA, 38 bp, Artificial Sequence
  primer
gtaaaacgacggccagtctttggctttcaaagtgggac

SEQ ID NO: 129048 - DNA, 21 bp, Artificial Sequence
  primer
aaggaaagtgatgcatttggg

SEQ ID NO: 129049 - DNA, 38 bp, Artificial Sequence
  primer
gtaaaacgacggccagtttgtgtcccaagaaacacagg

SEQ ID NO: 129050 - DNA, 21 bp, Artificial Sequence
  primer
cagtgtccttgtctcccaatg

SEQ ID NO: 129051 - DNA, 39 bp, Artificial Sequence
  primer
gtaaaacgacggccagttccactacatgttaccgcattc

SEQ ID NO: 129052 - DNA, 23 bp, Artificial Sequence
  primer
gcatgggataaatcaaatactgc

SEQ ID NO: 129053 - DNA, 21 bp, Artificial Sequence
  primer
ctgtctgagcacagaacctgc

SEQ ID NO: 129054 - DNA, 20 bp, Artificial Sequence
  primer
ggccaaaggctatccgtatc

SEQ ID NO: 129055 - DNA, 25 bp, Artificial Sequence
  primer
caatgaggcacataactatcacaga

SEQ ID NO: 129056 - DNA, 42 bp, Artificial Sequence
  primer
gtaaaacgacggccagtaatcaccagatctttcagtgaattt

SEQ ID NO: 129057 - DNA, 40 bp, Artificial Sequence
  primer
gtaaaacgacggccagtcctgctctaaggaatcaagcaac

SEQ ID NO: 129058 - DNA, 44 bp, Artificial Sequence
  primer
gtaaaacgacggccagtaaacaatcatggaaagtacaatttcag

SEQ ID NO: 129059 - DNA, 38 bp, Artificial Sequence
  primer
gtaaaacgacggccagtctggaataccctctggtctgg

SEQ ID NO: 129060 - DNA, 21 bp, Artificial Sequence
  primer
aagaattgtgctgacaaagcc

SEQ ID NO: 129061 - DNA, 20 bp, Artificial Sequence
  primer
ccagctacaggaggttgagg

SEQ ID NO: 129062 - DNA, 22 bp, Artificial Sequence
  primer
ggagatgaggtaaacatggctc

SEQ ID NO: 129063 - DNA, 38 bp, Artificial Sequence
  primer
gtaaaacgacggccagtgtgcgagtagtgaggaaatgg

SEQ ID NO: 129064 - DNA, 21 bp, Artificial Sequence
  primer
ttaccgcagaggtcataatgc

SEQ ID NO: 129065 - DNA, 42 bp, Artificial Sequence
  primer
gtaaaacgacggccagttcgtaaggatagctttcttcttgat

SEQ ID NO: 129066 - DNA, 22 bp, Artificial Sequence
  primer
tcctaagcccaatgtcaaacac

SEQ ID NO: 129067 - DNA, 21 bp, Artificial Sequence
  primer
atctttagggcaatgtgccag

SEQ ID NO: 129068 - DNA, 20 bp, Artificial Sequence
  primer
gcattgagaaggctgctctg

SEQ ID NO: 129069 - DNA, 38 bp, Artificial Sequence
  primer
gtaaaacgacggccagtcagcttcaaagtccaacccac

SEQ ID NO: 129070 - DNA, 21 bp, Artificial Sequence
  primer
gaatgaacaggctgagttccc

SEQ ID NO: 129071 - DNA, 38 bp, Artificial Sequence
  primer
gtaaaacgacggccagtataaacacatgtgcacggacc

SEQ ID NO: 129072 - DNA, 21 bp, Artificial Sequence
  primer
tcactggcaaagacagtcacc

SEQ ID NO: 129073 - DNA, 18 bp, Artificial Sequence
  primer
gcgagctgtggatgaagg

SEQ ID NO: 129074 - DNA, 19 bp, Artificial Sequence
  primer
gaggttggagctctggctg

SEQ ID NO: 129075 - DNA, 37 bp, Artificial Sequence
  primer
gtaaaacgacggccagtggctgttacttcctcaccgc

SEQ ID NO: 129076 - DNA, 38 bp, Artificial Sequence
  primer
gtaaaacgacggccagtgtgagtcgatggtaaggaccc

SEQ ID NO: 129077 - DNA, 39 bp, Artificial Sequence
  primer
gtaaaacgacggccagttgctccaggattcacaaagttc

SEQ ID NO: 129078 - DNA, 37 bp, Artificial Sequence
  primer
gtaaaacgacggccagtcattcccatctttgcagcac

SEQ ID NO: 129079 - DNA, 21 bp, Artificial Sequence
  primer
cacttggattccttgggtcac

SEQ ID NO: 129080 - DNA, 38 bp, Artificial Sequence
  primer
gtaaaacgacggccagtgaagagactgggtgcagatgg

SEQ ID NO: 129081 - DNA, 21 bp, Artificial Sequence
  primer
acagctccaacttgctcactg

SEQ ID NO: 129082 - DNA, 20 bp, Artificial Sequence
  primer
gggtcagatggacaggaagg

SEQ ID NO: 129083 - DNA, 21 bp, Artificial Sequence
  primer
aagtgatttggaagcagccag

SEQ ID NO: 129084 - DNA, 35 bp, Artificial Sequence
  primer
gtaaaacgacggccagtactttgtgggaccgaggc

SEQ ID NO: 129085 - DNA, 20 bp, Artificial Sequence
  primer
agaaggcctgatctggatgg

SEQ ID NO: 129086 - DNA, 21 bp, Artificial Sequence
  primer
cctgtagctggaagaaccacc

SEQ ID NO: 129087 - DNA, 21 bp, Artificial Sequence
  primer
aggtggcctatctgtcaaagc

SEQ ID NO: 129088 - DNA, 37 bp, Artificial Sequence
  primer
gtaaaacgacggccagtcacgttccaaggctcttcag

SEQ ID NO: 129089 - DNA, 20 bp, Artificial Sequence
  primer
cagcagaagctcagtcagcc

SEQ ID NO: 129090 - DNA, 21 bp, Artificial Sequence
  primer
acagccatgaaagcagcatag

SEQ ID NO: 129091 - DNA, 21 bp, Artificial Sequence
  primer
tgatctccattaactgctggg

SEQ ID NO: 129092 - DNA, 20 bp, Artificial Sequence
  primer
gtgaatcactcgcttggagc

SEQ ID NO: 129093 - DNA, 38 bp, Artificial Sequence
  primer
gtaaaacgacggccagttttctcccatttaccaggagc

SEQ ID NO: 129094 - DNA, 38 bp, Artificial Sequence
  primer
gtaaaacgacggccagtctggtcactaggttccttccc

SEQ ID NO: 129095 - DNA, 21 bp, Artificial Sequence
  primer
ttaagatgcacggatttgcac

SEQ ID NO: 129096 - DNA, 21 bp, Artificial Sequence
  primer
cagggttgtcagtgatgttgg

SEQ ID NO: 129097 - DNA, 38 bp, Artificial Sequence
  primer
gtaaaacgacggccagtagtaatccacggagatggagg

SEQ ID NO: 129098 - DNA, 18 bp, Artificial Sequence
  primer
ggtccctggcctaggagg

SEQ ID NO: 129099 - DNA, 21 bp, Artificial Sequence
  primer
attcaccctgtgtcccttctg

SEQ ID NO: 129100 - DNA, 37 bp, Artificial Sequence
  primer
gtaaaacgacggccagtaagggtaggcctccttctgc

SEQ ID NO: 129101 - DNA, 21 bp, Artificial Sequence
  primer
tttctcagattccagggaagg

SEQ ID NO: 129102 - DNA, 23 bp, Artificial Sequence
  primer
gatatatgggtcctattcacgcc

SEQ ID NO: 129103 - DNA, 35 bp, Artificial Sequence
  primer
gtaaaacgacggccagtggctgagactgggcaatg

SEQ ID NO: 129104 - DNA, 19 bp, Artificial Sequence
  primer
cccagtcccttcccttcac

SEQ ID NO: 129105 - DNA, 23 bp, Artificial Sequence
  primer
cccacctgtgtagagactcattc

SEQ ID NO: 129106 - DNA, 38 bp, Artificial Sequence
  primer
gtaaaacgacggccagttttccagactcttgcttgtgc

SEQ ID NO: 129107 - DNA, 44 bp, Artificial Sequence
  primer
gtaaaacgacggccagtggatcgtaacactacaagaaatgtagg

SEQ ID NO: 129108 - DNA, 43 bp, Artificial Sequence
  primer
gtaaaacgacggccagttcattatttcctacaactacttgccc

SEQ ID NO: 129109 - DNA, 24 bp, Artificial Sequence
  primer
cacttgcagtaatagatttggcac

SEQ ID NO: 129110 - DNA, 22 bp, Artificial Sequence
  primer
ccagaacattccttgaataggg

SEQ ID NO: 129111 - DNA, 38 bp, Artificial Sequence
  primer
gtaaaacgacggccagtttcatccctcatgatgaaacc

SEQ ID NO: 129112 - DNA, 38 bp, Artificial Sequence
  primer
gtaaaacgacggccagtgcttgagagcttccaccaatc

SEQ ID NO: 129113 - DNA, 36 bp, Artificial Sequence
  primer
gtaaaacgacggccagtcgtgaccagacttgggtgt

SEQ ID NO: 129114 - DNA, 21 bp, Artificial Sequence
  primer
tcctggtctttcttgtccagc

SEQ ID NO: 129115 - DNA, 37 bp, Artificial Sequence
  primer
gtaaaacgacggccagtcacgaactgagacgggtagc

SEQ ID NO: 129116 - DNA, 38 bp, Artificial Sequence
  primer
gtaaaacgacggccagtggtaacctcccaagcaatagg

SEQ ID NO: 129117 - DNA, 19 bp, Artificial Sequence
  primer
cagcatgaagccgtaggtg

SEQ ID NO: 129118 - DNA, 38 bp, Artificial Sequence
  primer
gtaaaacgacggccagtagcgcgtatggcgaatagtag

SEQ ID NO: 129119 - DNA, 38 bp, Artificial Sequence
  primer
gtaaaacgacggccagttcaagcagtagtggaggttgc

SEQ ID NO: 129120 - DNA, 20 bp, Artificial Sequence
  primer
cacgttcagcttcagcaggt

SEQ ID NO: 129121 - DNA, 37 bp, Artificial Sequence
  primer
gtaaaacgacggccagtgggcctagaccgacagacag

SEQ ID NO: 129122 - DNA, 21 bp, Artificial Sequence
  primer
accctctgcatctcagaaagg

SEQ ID NO: 129123 - DNA, 21 bp, Artificial Sequence
  primer
acagccgactgtaggtggtag

SEQ ID NO: 129124 - DNA, 38 bp, Artificial Sequence
  primer
gtaaaacgacggccagttctgtagtgtgtggtaggcgg

SEQ ID NO: 129125 - DNA, 21 bp, Artificial Sequence
  primer
tccagtattggctccacaagg

SEQ ID NO: 129126 - DNA, 35 bp, Artificial Sequence
  primer
gtaaaacgacggccagtcacccaagcccatcactc

SEQ ID NO: 129127 - DNA, 38 bp, Artificial Sequence
  primer
gtaaaacgacggccagtttgccttgaaagctcagaagc

SEQ ID NO: 129128 - DNA, 20 bp, Artificial Sequence
  primer
ctggcagaaacctgaggatg

SEQ ID NO: 129129 - DNA, 38 bp, Artificial Sequence
  primer
gtaaaacgacggccagtggagtacctttgggaagaggc

SEQ ID NO: 129130 - DNA, 21 bp, Artificial Sequence
  primer
tacaaagcttctgcctcatgc

SEQ ID NO: 129131 - DNA, 21 bp, Artificial Sequence
  primer
gggtgacaaagtgagaccctg

SEQ ID NO: 129132 - DNA, 21 bp, Artificial Sequence
  primer
gctgaggacaaggatggagac

SEQ ID NO: 129133 - DNA, 20 bp, Artificial Sequence
  primer
ctgcctctcccacttatccc

SEQ ID NO: 129134 - DNA, 21 bp, Artificial Sequence
  primer
ctggtaaggcaggagtggaag

SEQ ID NO: 129135 - DNA, 20 bp, Artificial Sequence
  primer
agcttccagttctgggcttc

SEQ ID NO: 129136 - DNA, 38 bp, Artificial Sequence
  primer
gtaaaacgacggccagtaacttgcacttggctcctctc

SEQ ID NO: 129137 - DNA, 18 bp, Artificial Sequence
  primer
aaatgagggccatcaggg

SEQ ID NO: 129138 - DNA, 21 bp, Artificial Sequence
  primer
aggaggtgcagcattagttgg

SEQ ID NO: 129139 - DNA, 21 bp, Artificial Sequence
  primer
tctgggaagcgatagggtaag

SEQ ID NO: 129140 - DNA, 21 bp, Artificial Sequence
  primer
cactgtgaggcttgaagatgg

SEQ ID NO: 129141 - DNA, 21 bp, Artificial Sequence
  primer
caggtcctctctggctcgtag

SEQ ID NO: 129142 - DNA, 21 bp, Artificial Sequence
  primer
gcagcaaagtagtgatttggg

SEQ ID NO: 129143 - DNA, 21 bp, Artificial Sequence
  primer
actccttccttctcctcaccc

SEQ ID NO: 129144 - DNA, 21 bp, Artificial Sequence
  primer
cgggtggacacactgatgtag

SEQ ID NO: 129145 - DNA, 38 bp, Artificial Sequence
  primer
gtaaaacgacggccagttagagcagagcaaagagctgg

SEQ ID NO: 129146 - DNA, 21 bp, Artificial Sequence
  primer
ctctgggcaacttattcagcc

SEQ ID NO: 129147 - DNA, 21 bp, Artificial Sequence
  primer
tcagactgctgggcttcatag

SEQ ID NO: 129148 - DNA, 21 bp, Artificial Sequence
  primer
gaaggaaatgcaaggaaggag

SEQ ID NO: 129149 - DNA, 21 bp, Artificial Sequence
  primer
agcctgagaaacatcctctgc

SEQ ID NO: 129150 - DNA, 21 bp, Artificial Sequence
  primer
gggtgcaggaagatgaatcag

SEQ ID NO: 129151 - DNA, 20 bp, Artificial Sequence
  primer
agaatggcctgtgggagaac

SEQ ID NO: 129152 - DNA, 21 bp, Artificial Sequence
  primer
taggagaacggtgaagatggg

SEQ ID NO: 129153 - DNA, 21 bp, Artificial Sequence
  primer
tgtccagagaagatgtgtggg

SEQ ID NO: 129154 - DNA, 38 bp, Artificial Sequence
  primer
gtaaaacgacggccagtcagttcccttcctagcacctg

SEQ ID NO: 129155 - DNA, 37 bp, Artificial Sequence
  primer
gtaaaacgacggccagtgtttatctcagctctgcgcc

SEQ ID NO: 129156 - DNA, 21 bp, Artificial Sequence
  primer
cacgcctgattcttcatgttc

SEQ ID NO: 129157 - DNA, 20 bp, Artificial Sequence
  primer
gagccaccaaggagaaggtg

SEQ ID NO: 129158 - DNA, 38 bp, Artificial Sequence
  primer
gtaaaacgacggccagtagatcctggagacacccagtg

SEQ ID NO: 129159 - DNA, 21 bp, Artificial Sequence
  primer
ctcccacattcagaccacaag

SEQ ID NO: 129160 - DNA, 38 bp, Artificial Sequence
  primer
gtaaaacgacggccagtattgatggaaacagacagccc

SEQ ID NO: 129161 - DNA, 21 bp, Artificial Sequence
  primer
ctcccacttaccacttctggc

SEQ ID NO: 129162 - DNA, 20 bp, Artificial Sequence
  primer
caaacccaagaaagctgcac

SEQ ID NO: 129163 - DNA, 20 bp, Artificial Sequence
  primer
atgagtttccaggtcctccg

SEQ ID NO: 129164 - DNA, 39 bp, Artificial Sequence
  primer
gtaaaacgacggccagtccagcccagacagtttaagaag

SEQ ID NO: 129165 - DNA, 21 bp, Artificial Sequence
  primer
atcactgatggaacgagatgg

SEQ ID NO: 129166 - DNA, 39 bp, Artificial Sequence
  primer
gtaaaacgacggccagtaatctcttacccatcccacctc

SEQ ID NO: 129167 - DNA, 38 bp, Artificial Sequence
  primer
gtaaaacgacggccagtgggagtaaccaaggaacccag

SEQ ID NO: 129168 - DNA, 22 bp, Artificial Sequence
  primer
cctgctttaggtgatttggttg

SEQ ID NO: 129169 - DNA, 38 bp, Artificial Sequence
  primer
gtaaaacgacggccagtatttgaccatccaagaggctg

SEQ ID NO: 129170 - DNA, 38 bp, Artificial Sequence
  primer
gtaaaacgacggccagtcctaattcctcaccatgctcc

SEQ ID NO: 129171 - DNA, 37 bp, Artificial Sequence
  primer
gtaaaacgacggccagtgtctctcacgttcggtgctc

SEQ ID NO: 129172 - DNA, 37 bp, Artificial Sequence
  primer
gtaaaacgacggccagtgttcccgtggaataaggcac

SEQ ID NO: 129173 - DNA, 19 bp, Artificial Sequence
  primer
gaaagttgggtggagctgg

SEQ ID NO: 129174 - DNA, 21 bp, Artificial Sequence
  primer
gtgttgccatggaagaagatg

SEQ ID NO: 129175 - DNA, 38 bp, Artificial Sequence
  primer
gtaaaacgacggccagtaaagacgtgcatgaggttgtc

SEQ ID NO: 129176 - DNA, 21 bp, Artificial Sequence
  primer
ctgagcagcttgtagaggtcg

SEQ ID NO: 129177 - DNA, 38 bp, Artificial Sequence
  primer
gtaaaacgacggccagttcttcatctggaactcctggg

SEQ ID NO: 129178 - DNA, 38 bp, Artificial Sequence
  primer
gtaaaacgacggccagtatgttccgccaggctacatac

SEQ ID NO: 129179 - DNA, 21 bp, Artificial Sequence
  primer
tcgtacttcacctccctcacc

SEQ ID NO: 129180 - DNA, 38 bp, Artificial Sequence
  primer
gtaaaacgacggccagtctccacagtgggattaatggg

SEQ ID NO: 129181 - DNA, 21 bp, Artificial Sequence
  primer
gaagacctgctttcatcccag

SEQ ID NO: 129182 - DNA, 38 bp, Artificial Sequence
  primer
gtaaaacgacggccagtaaatgatcagcgcaggatttc

SEQ ID NO: 129183 - DNA, 39 bp, Artificial Sequence
  primer
gtaaaacgacggccagttgaataagattcccagcacgac

SEQ ID NO: 129184 - DNA, 21 bp, Artificial Sequence
  primer
aacccaagtattcggtcatgg

SEQ ID NO: 129185 - DNA, 22 bp, Artificial Sequence
  primer
tcagcttcctgtagctcattcc

SEQ ID NO: 129186 - DNA, 38 bp, Artificial Sequence
  primer
gtaaaacgacggccagtagatgaaaggcttagatgccg

SEQ ID NO: 129187 - DNA, 21 bp, Artificial Sequence
  primer
aatgtatgggctaggtgggtg

SEQ ID NO: 129188 - DNA, 38 bp, Artificial Sequence
  primer
gtaaaacgacggccagtatttcctaagtcttcggtggc

SEQ ID NO: 129189 - DNA, 38 bp, Artificial Sequence
  primer
gtaaaacgacggccagtctgatgagaaaggacactggg

SEQ ID NO: 129190 - DNA, 21 bp, Artificial Sequence
  primer
tggtcatgcaattgagatttg

SEQ ID NO: 129191 - DNA, 23 bp, Artificial Sequence
  primer
tcacgcattcaagagtatattgc

SEQ ID NO: 129192 - DNA, 35 bp, Artificial Sequence
  primer
gtaaaacgacggccagtcctctccctgggcttcag

SEQ ID NO: 129193 - DNA, 36 bp, Artificial Sequence
  primer
gtaaaacgacggccagtacttgccgggaagactgtg

SEQ ID NO: 129194 - DNA, 21 bp, Artificial Sequence
  primer
taacagcagggtggaatttgg

SEQ ID NO: 129195 - DNA, 38 bp, Artificial Sequence
  primer
gtaaaacgacggccagttatgctgacatcagtccaccc

SEQ ID NO: 129196 - DNA, 38 bp, Artificial Sequence
  primer
gtaaaacgacggccagtgggtattctaggttgcccagg

SEQ ID NO: 129197 - DNA, 21 bp, Artificial Sequence
  primer
ctgtgagatctgtgggctgag

SEQ ID NO: 129198 - DNA, 21 bp, Artificial Sequence
  primer
ctggctgactccggtcttaac

SEQ ID NO: 129199 - DNA, 21 bp, Artificial Sequence
  primer
acagggaggctgagtgacttc

SEQ ID NO: 129200 - DNA, 20 bp, Artificial Sequence
  primer
actggatctcaggccaaacc

SEQ ID NO: 129201 - DNA, 20 bp, Artificial Sequence
  primer
ggcagtttgagcagttccag

SEQ ID NO: 129202 - DNA, 21 bp, Artificial Sequence
  primer
gtacgcatgcacacatacacg

SEQ ID NO: 129203 - DNA, 41 bp, Artificial Sequence
  primer
gtaaaacgacggccagtgagaagaaatccttagcaatgcac

SEQ ID NO: 129204 - DNA, 22 bp, Artificial Sequence
  primer
tcacagagctacagcatgaagg

SEQ ID NO: 129205 - DNA, 37 bp, Artificial Sequence
  primer
gtaaaacgacggccagtcaccgccaaagtttcaacac

SEQ ID NO: 129206 - DNA, 21 bp, Artificial Sequence
  primer
ccaagcacatcctgtatggac

SEQ ID NO: 129207 - DNA, 21 bp, Artificial Sequence
  primer
agcttctttccaacctgagga

SEQ ID NO: 129208 - DNA, 38 bp, Artificial Sequence
  primer
gtaaaacgacggccagtgaaacattgtgccttggacag

SEQ ID NO: 129209 - DNA, 20 bp, Artificial Sequence
  primer
cccttgacctcaactgatcc

SEQ ID NO: 129210 - DNA, 37 bp, Artificial Sequence
  primer
gtaaaacgacggccagtcctgccacactccttccttc

SEQ ID NO: 129211 - DNA, 40 bp, Artificial Sequence
  primer
gtaaaacgacggccagtgcagaaagcaactgtatttcagg

SEQ ID NO: 129212 - DNA, 21 bp, Artificial Sequence
  primer
ccatgggatgatgagagacac

SEQ ID NO: 129213 - DNA, 20 bp, Artificial Sequence
  primer
cacttgagcccaggagtttg

SEQ ID NO: 129214 - DNA, 21 bp, Artificial Sequence
  primer
ccactgtacccagaccatttg

SEQ ID NO: 129215 - DNA, 21 bp, Artificial Sequence
  primer
accatccatcgtaagtcaggg

SEQ ID NO: 129216 - DNA, 21 bp, Artificial Sequence
  primer
attgaatgaggtgagaggtgc

SEQ ID NO: 129217 - DNA, 21 bp, Artificial Sequence
  primer
cggaagtccagttcaaacaag

SEQ ID NO: 129218 - DNA, 20 bp, Artificial Sequence
  primer
ttatttcttccctgccctgc

SEQ ID NO: 129219 - DNA, 38 bp, Artificial Sequence
  primer
gtaaaacgacggccagtcaaagcttccgaagtcctgtc

SEQ ID NO: 129220 - DNA, 38 bp, Artificial Sequence
  primer
gtaaaacgacggccagtctggttggccatcagtatcac

SEQ ID NO: 129221 - DNA, 21 bp, Artificial Sequence
  primer
cttgtggccatccttcatttc

SEQ ID NO: 129222 - DNA, 21 bp, Artificial Sequence
  primer
atagagactttccgacagggc

SEQ ID NO: 129223 - DNA, 20 bp, Artificial Sequence
  primer
tcatagccattgactgtgcg

SEQ ID NO: 129224 - DNA, 19 bp, Artificial Sequence
  primer
agtgctgggcactgggtag

SEQ ID NO: 129225 - DNA, 21 bp, Artificial Sequence
  primer
gagctggtacaggaggctgtg

SEQ ID NO: 129226 - DNA, 35 bp, Artificial Sequence
  primer
gtaaaacgacggccagtgctgtctgcgtaccctgc

SEQ ID NO: 129227 - DNA, 38 bp, Artificial Sequence
  primer
gtaaaacgacggccagtgtgttgcacacactcttgctg

SEQ ID NO: 129228 - DNA, 37 bp, Artificial Sequence
  primer
gtaaaacgacggccagtgccttggtatgtgaggttgc

SEQ ID NO: 129229 - DNA, 21 bp, Artificial Sequence
  primer
ctaggatccttgaggctgcac

SEQ ID NO: 129230 - DNA, 20 bp, Artificial Sequence
  primer
tttcctctgcagtggtttcc

SEQ ID NO: 129231 - DNA, 21 bp, Artificial Sequence
  primer
ggtgagggactgaggtagcag

SEQ ID NO: 129232 - DNA, 38 bp, Artificial Sequence
  primer
gtaaaacgacggccagtggaacaattccgtgaaagtcc

SEQ ID NO: 129233 - DNA, 38 bp, Artificial Sequence
  primer
gtaaaacgacggccagtactcagagctgctcctgcttc

SEQ ID NO: 129234 - DNA, 24 bp, Artificial Sequence
  primer
aatgctctccaaatttaaggtcac

SEQ ID NO: 129235 - DNA, 38 bp, Artificial Sequence
  primer
gtaaaacgacggccagtcatccagcaccatgaagtcac

SEQ ID NO: 129236 - DNA, 37 bp, Artificial Sequence
  primer
gtaaaacgacggccagtgtgctttggtagggagggag

SEQ ID NO: 129237 - DNA, 36 bp, Artificial Sequence
  primer
gtaaaacgacggccagtcacattgcagcagacggag

SEQ ID NO: 129238 - DNA, 35 bp, Artificial Sequence
  primer
gtaaaacgacggccagtgtccgaagccagaggagc

SEQ ID NO: 129239 - DNA, 37 bp, Artificial Sequence
  primer
gtaaaacgacggccagtgcttgaggtagcactcgtgg

SEQ ID NO: 129240 - DNA, 20 bp, Artificial Sequence
  primer
ctggatttggatttggaggg

SEQ ID NO: 129241 - DNA, 21 bp, Artificial Sequence
  primer
cagctacccacaggaaccaag

SEQ ID NO: 129242 - DNA, 37 bp, Artificial Sequence
  primer
gtaaaacgacggccagtacagcttcctcaaagggacc

SEQ ID NO: 129243 - DNA, 25 bp, Artificial Sequence
  primer
caactgcctgttaacctgttatttc

SEQ ID NO: 129244 - DNA, 37 bp, Artificial Sequence
  primer
gtaaaacgacggccagtactgagatgagacccgggag

SEQ ID NO: 129245 - DNA, 20 bp, Artificial Sequence
  primer
tctggagtcaagagcatcgc

SEQ ID NO: 129246 - DNA, 38 bp, Artificial Sequence
  primer
gtaaaacgacggccagtctatttcccagccaacaggac

SEQ ID NO: 129247 - DNA, 38 bp, Artificial Sequence
  primer
gtaaaacgacggccagtgccagcccaaggtagttcttc

SEQ ID NO: 129248 - DNA, 21 bp, Artificial Sequence
  primer
ctggaggagatgggaactcag

SEQ ID NO: 129249 - DNA, 36 bp, Artificial Sequence
  primer
gtaaaacgacggccagtcagacatgaccatgtgccc

SEQ ID NO: 129250 - DNA, 21 bp, Artificial Sequence
  primer
cctaagagcttcctggtgctg

SEQ ID NO: 129251 - DNA, 38 bp, Artificial Sequence
  primer
gtaaaacgacggccagtgaggaagcactagcgatttgg

SEQ ID NO: 129252 - DNA, 21 bp, Artificial Sequence
  primer
aggagaccaggaaacctgagc

SEQ ID NO: 129253 - DNA, 21 bp, Artificial Sequence
  primer
ctggttgtgagttctgttccc

SEQ ID NO: 129254 - DNA, 20 bp, Artificial Sequence
  primer
tctgggaagtcaggaactgg

SEQ ID NO: 129255 - DNA, 38 bp, Artificial Sequence
  primer
gtaaaacgacggccagtaatttcccagtccagagcttc

SEQ ID NO: 129256 - DNA, 23 bp, Artificial Sequence
  primer
aaaggctttccagtgaacctaaa

SEQ ID NO: 129257 - DNA, 38 bp, Artificial Sequence
  primer
gtaaaacgacggccagtacccagcaggcagtcaaatac

SEQ ID NO: 129258 - DNA, 38 bp, Artificial Sequence
  primer
gtaaaacgacggccagtgatgtcccttccagctttgag

SEQ ID NO: 129259 - DNA, 38 bp, Artificial Sequence
  primer
gtaaaacgacggccagttctgggcaaatcaactctcag

SEQ ID NO: 129260 - DNA, 27 bp, Artificial Sequence
  primer
tgtaggtttgagatttcttagtttagc

SEQ ID NO: 129261 - DNA, 21 bp, Artificial Sequence
  primer
tttcccactgcctaatgtgtg

SEQ ID NO: 129262 - DNA, 26 bp, Artificial Sequence
  primer
caattcactaaatatggaggaagaaa

SEQ ID NO: 129263 - DNA, 40 bp, Artificial Sequence
  primer
gtaaaacgacggccagtgttaagccgtccattacaagaag

SEQ ID NO: 129264 - DNA, 21 bp, Artificial Sequence
  primer
agtcactggagcccatttagc

SEQ ID NO: 129265 - DNA, 38 bp, Artificial Sequence
  primer
gtaaaacgacggccagtgatcaaagctgcagtgagacg

SEQ ID NO: 129266 - DNA, 20 bp, Artificial Sequence
  primer
ccaagcaaatcacccaagac

SEQ ID NO: 129267 - DNA, 22 bp, Artificial Sequence
  primer
tgcctcaggtaatggaatgagt

SEQ ID NO: 129268 - DNA, 38 bp, Artificial Sequence
  primer
gtaaaacgacggccagtcagttacatgctgctgccttc

SEQ ID NO: 129269 - DNA, 37 bp, Artificial Sequence
  primer
gtaaaacgacggccagtaatccgaagggttgcagttt

SEQ ID NO: 129270 - DNA, 38 bp, Artificial Sequence
  primer
gtaaaacgacggccagtgccatttcctgtatctccagc

SEQ ID NO: 129271 - DNA, 38 bp, Artificial Sequence
  primer
gtaaaacgacggccagtcagagcaaactggagtcaggg

SEQ ID NO: 129272 - DNA, 21 bp, Artificial Sequence
  primer
aaatgccaagtgggagtcaag

SEQ ID NO: 129273 - DNA, 20 bp, Artificial Sequence
  primer
aagaacggaaacttgggagc

SEQ ID NO: 129274 - DNA, 39 bp, Artificial Sequence
  primer
gtaaaacgacggccagtttcttctgcttatccaaaccca

SEQ ID NO: 129275 - DNA, 23 bp, Artificial Sequence
  primer
ggctattactgctattcgcttcc

SEQ ID NO: 129276 - DNA, 38 bp, Artificial Sequence
  primer
gtaaaacgacggccagtcacaccagctaacacaggttg

SEQ ID NO: 129277 - DNA, 21 bp, Artificial Sequence
  primer
ggagggagacaagtccttcag

SEQ ID NO: 129278 - DNA, 39 bp, Artificial Sequence
  primer
gtaaaacgacggccagtccatgattagcaatggatcctg

SEQ ID NO: 129279 - DNA, 23 bp, Artificial Sequence
  primer
ggtgaacaccagagctgtaactg

SEQ ID NO: 129280 - DNA, 21 bp, Artificial Sequence
  primer
cgtgaagagtgtaacccaccc

SEQ ID NO: 129281 - DNA, 38 bp, Artificial Sequence
  primer
gtaaaacgacggccagtatgaatgtcctcctaccctgg

SEQ ID NO: 129282 - DNA, 38 bp, Artificial Sequence
  primer
gtaaaacgacggccagtaaagtctagaagcgcacggag

SEQ ID NO: 129283 - DNA, 23 bp, Artificial Sequence
  primer
ccagaagcagaagcctgtatagc

SEQ ID NO: 129284 - DNA, 37 bp, Artificial Sequence
  primer
gtaaaacgacggccagtaatagggcctcagttcctgc

SEQ ID NO: 129285 - DNA, 40 bp, Artificial Sequence
  primer
gtaaaacgacggccagtccctttcattaataggtcttgcc

SEQ ID NO: 129286 - DNA, 37 bp, Artificial Sequence
  primer
gtaaaacgacggccagtggaagtatctgcctcccacc

SEQ ID NO: 129287 - DNA, 21 bp, Artificial Sequence
  primer
attacagggaggtggttctgg

SEQ ID NO: 129288 - DNA, 21 bp, Artificial Sequence
  primer
aacgtcgtcttcgcactaacc

SEQ ID NO: 129289 - DNA, 25 bp, Artificial Sequence
  primer
gcagttatttactttgaaacggagg

SEQ ID NO: 129290 - DNA, 43 bp, Artificial Sequence
  primer
gtaaaacgacggccagtcattaagaacacagctgtacatgagc

SEQ ID NO: 129291 - DNA, 21 bp, Artificial Sequence
  primer
agccactaagaacagccaacc

SEQ ID NO: 129292 - DNA, 26 bp, Artificial Sequence
  primer
gaactcagagaacatgaactctacca

SEQ ID NO: 129293 - DNA, 38 bp, Artificial Sequence
  primer
gtaaaacgacggccagtcgaatccaagtcttagagggc

SEQ ID NO: 129294 - DNA, 21 bp, Artificial Sequence
  primer
atgattccaagctttcatggg

SEQ ID NO: 129295 - DNA, 40 bp, Artificial Sequence
  primer
gtaaaacgacggccagtgcattgtggaaacagagttaccc

SEQ ID NO: 129296 - DNA, 37 bp, Artificial Sequence
  primer
gtaaaacgacggccagtttctgttggccagaatcaca

SEQ ID NO: 129297 - DNA, 27 bp, Artificial Sequence
  primer
catctaaattgtttaaggtgctaatgc

SEQ ID NO: 129298 - DNA, 21 bp, Artificial Sequence
  primer
cacaaatgccaagatgctctc

SEQ ID NO: 129299 - DNA, 19 bp, Artificial Sequence
  primer
gaccgctggtcatccactc

SEQ ID NO: 129300 - DNA, 21 bp, Artificial Sequence
  primer
tactccgttccagtaccaccc

SEQ ID NO: 129301 - DNA, 20 bp, Artificial Sequence
  primer
acttgaacccaggaaatggg

SEQ ID NO: 129302 - DNA, 37 bp, Artificial Sequence
  primer
gtaaaacgacggccagtaactcccatgagggacaagg

SEQ ID NO: 129303 - DNA, 21 bp, Artificial Sequence
  primer
cccataagatccacaggcttc

SEQ ID NO: 129304 - DNA, 19 bp, Artificial Sequence
  primer
gaccgctggtcatccactc

SEQ ID NO: 129305 - DNA, 22 bp, Artificial Sequence
  primer
tgggcaaacattctccatagac

SEQ ID NO: 129306 - DNA, 20 bp, Artificial Sequence
  primer
gacttggaacgggatctgtg

SEQ ID NO: 129307 - DNA, 23 bp, Artificial Sequence
  primer
tctgttaggcagtacagtcaggc

SEQ ID NO: 129308 - DNA, 21 bp, Artificial Sequence
  primer
ggagacaagcacgaaactcag

SEQ ID NO: 129309 - DNA, 23 bp, Artificial Sequence
  primer
cccaacctccagatcctttatac

SEQ ID NO: 129310 - DNA, 35 bp, Artificial Sequence
  primer
gtaaaacgacggccagtgcttcgtcctcgtcctcc

SEQ ID NO: 129311 - DNA, 20 bp, Artificial Sequence
  primer
gtcctgcagcaagggaactc

SEQ ID NO: 129312 - DNA, 36 bp, Artificial Sequence
  primer
gtaaaacgacggccagttcctccggagagagctgtg

SEQ ID NO: 129313 - DNA, 38 bp, Artificial Sequence
  primer
gtaaaacgacggccagtcctaggagaagatcaaggccc

SEQ ID NO: 129314 - DNA, 21 bp, Artificial Sequence
  primer
ggtcgcacagtctcaggaatc

SEQ ID NO: 129315 - DNA, 21 bp, Artificial Sequence
  primer
tctcatggagctgatacgcag

SEQ ID NO: 129316 - DNA, 21 bp, Artificial Sequence
  primer
caggacagctatgtcccttcc

SEQ ID NO: 129317 - DNA, 21 bp, Artificial Sequence
  primer
cagtgttcttcacccttcacc

SEQ ID NO: 129318 - DNA, 21 bp, Artificial Sequence
  primer
gggttgccagaatagtaaggg

SEQ ID NO: 129319 - DNA, 36 bp, Artificial Sequence
  primer
gtaaaacgacggccagtagcagccaatgacacaacg

SEQ ID NO: 129320 - DNA, 19 bp, Artificial Sequence
  primer
accagggtcaccagtctgc

SEQ ID NO: 129321 - DNA, 21 bp, Artificial Sequence
  primer
atcctggaagttaatgccctg

SEQ ID NO: 129322 - DNA, 21 bp, Artificial Sequence
  primer
agacttagcacactgcctggg

SEQ ID NO: 129323 - DNA, 23 bp, Artificial Sequence
  primer
cccattgtctggatgagagttag

SEQ ID NO: 129324 - DNA, 18 bp, Artificial Sequence
  primer
actccatcctcccgctcc

SEQ ID NO: 129325 - DNA, 38 bp, Artificial Sequence
  primer
gtaaaacgacggccagtgcatttggaggacttgttgtg

SEQ ID NO: 129326 - DNA, 21 bp, Artificial Sequence
  primer
tcacaccattcccttcctttc

SEQ ID NO: 129327 - DNA, 23 bp, Artificial Sequence
  primer
ggaagtctttatcctgttgtgcc

SEQ ID NO: 129328 - DNA, 38 bp, Artificial Sequence
  primer
gtaaaacgacggccagttcagcgaacacaaatacccac

SEQ ID NO: 129329 - DNA, 22 bp, Artificial Sequence
  primer
tttaaatcaatctccaccagcc

SEQ ID NO: 129330 - DNA, 25 bp, Artificial Sequence
  primer
acaaagttaactgggtggaaatatg

SEQ ID NO: 129331 - DNA, 23 bp, Artificial Sequence
  primer
caatttctcaggagttagttgcc

SEQ ID NO: 129332 - DNA, 38 bp, Artificial Sequence
  primer
gtaaaacgacggccagtcagggcagctaagcaattagg

SEQ ID NO: 129333 - DNA, 22 bp, Artificial Sequence
  primer
tttaaccacatctcgtaggtca

SEQ ID NO: 129334 - DNA, 38 bp, Artificial Sequence
  primer
gtaaaacgacggccagtagactggactcttctgatgcg

SEQ ID NO: 129335 - DNA, 38 bp, Artificial Sequence
  primer
gtaaaacgacggccagtgccacacatactggaaagacc

SEQ ID NO: 129336 - DNA, 25 bp, Artificial Sequence
  primer
aagtcagttctcggtgtaagagatg

SEQ ID NO: 129337 - DNA, 21 bp, Artificial Sequence
  primer
tctgaagggcttcttgacatc

SEQ ID NO: 129338 - DNA, 21 bp, Artificial Sequence
  primer
ctgaaactccagaggcaaacc

SEQ ID NO: 129339 - DNA, 37 bp, Artificial Sequence
  primer
gtaaaacgacggccagtcattataaggcagggcatgg

SEQ ID NO: 129340 - DNA, 18 bp, Artificial Sequence
  primer
gggcgcctatagtcccag

SEQ ID NO: 129341 - DNA, 21 bp, Artificial Sequence
  primer
atgagctgtgcaatcccactc

SEQ ID NO: 129342 - DNA, 21 bp, Artificial Sequence
  primer
ttactgaaagaaccgcagcac

SEQ ID NO: 129343 - DNA, 38 bp, Artificial Sequence
  primer
gtaaaacgacggccagtctcaagcctggacttcctcac

SEQ ID NO: 129344 - DNA, 21 bp, Artificial Sequence
  primer
tgttccacagcctgtacttcc

SEQ ID NO: 129345 - DNA, 21 bp, Artificial Sequence
  primer
acaacaggcttgcagataggc

SEQ ID NO: 129346 - DNA, 20 bp, Artificial Sequence
  primer
cttcagagacacactggccc

SEQ ID NO: 129347 - DNA, 21 bp, Artificial Sequence
  primer
cccatctcctcttgctaccac

SEQ ID NO: 129348 - DNA, 21 bp, Artificial Sequence
  primer
tagacctcggtggagaaggag

SEQ ID NO: 129349 - DNA, 21 bp, Artificial Sequence
  primer
accttgctttcatgtcgtgtg

SEQ ID NO: 129350 - DNA, 22 bp, Artificial Sequence
  primer
gggtcgctcaccatatttgtag

SEQ ID NO: 129351 - DNA, 21 bp, Artificial Sequence
  primer
gttgtaaattggccacagtcg

SEQ ID NO: 129352 - DNA, 21 bp, Artificial Sequence
  primer
ggttggtgtagggcatctctc

SEQ ID NO: 129353 - DNA, 21 bp, Artificial Sequence
  primer
taaagcacccagcactcagtc

SEQ ID NO: 129354 - DNA, 20 bp, Artificial Sequence
  primer
ccaccaaattgcaggtgttg

SEQ ID NO: 129355 - DNA, 37 bp, Artificial Sequence
  primer
gtaaaacgacggccagtacctctccaggagggaacag

SEQ ID NO: 129356 - DNA, 21 bp, Artificial Sequence
  primer
atcccaaagaacctcaacacg

SEQ ID NO: 129357 - DNA, 38 bp, Artificial Sequence
  primer
gtaaaacgacggccagtccactggatagagatgcccag

SEQ ID NO: 129358 - DNA, 21 bp, Artificial Sequence
  primer
tgatggcgtgtaaggattgac

SEQ ID NO: 129359 - DNA, 38 bp, Artificial Sequence
  primer
gtaaaacgacggccagttggcaggtaagggatgacttc

SEQ ID NO: 129360 - DNA, 38 bp, Artificial Sequence
  primer
gtaaaacgacggccagtcgatggcatgtaaggtttgac

SEQ ID NO: 129361 - DNA, 38 bp, Artificial Sequence
  primer
gtaaaacgacggccagttcttctgaggcttgatttgcc

SEQ ID NO: 129362 - DNA, 22 bp, Artificial Sequence
  primer
ggaatttacaggtgaagatggc

SEQ ID NO: 129363 - DNA, 19 bp, Artificial Sequence
  primer
atgcattgggttcctttgc

SEQ ID NO: 129364 - DNA, 43 bp, Artificial Sequence
  primer
gtaaaacgacggccagttctccacttaaattgcaaagtaaacc

SEQ ID NO: 129365 - DNA, 25 bp, Artificial Sequence
  primer
gcatctggctttagaaagaagagag

SEQ ID NO: 129366 - DNA, 39 bp, Artificial Sequence
  primer
gtaaaacgacggccagtcatctgctagtggatttccagg

SEQ ID NO: 129367 - DNA, 21 bp, Artificial Sequence
  primer
tttggagatgaggcttgtacc

SEQ ID NO: 129368 - DNA, 41 bp, Artificial Sequence
  primer
gtaaaacgacggccagttgggatgtgttaagccatatacaa

SEQ ID NO: 129369 - DNA, 26 bp, Artificial Sequence
  primer
tgagaaaggatatgtttagaagccac

SEQ ID NO: 129370 - DNA, 38 bp, Artificial Sequence
  primer
gtaaaacgacggccagtacagcgtatgtacaggctggc

SEQ ID NO: 129371 - DNA, 44 bp, Artificial Sequence
  primer
gtaaaacgacggccagtgagaatatatgacagccttaatatggg

SEQ ID NO: 129372 - DNA, 29 bp, Artificial Sequence
  primer
tctagggtttaaagtaagtgagactcttt

SEQ ID NO: 129373 - DNA, 39 bp, Artificial Sequence
  primer
gtaaaacgacggccagttcccacatgtactggtcagaaa

SEQ ID NO: 129374 - DNA, 39 bp, Artificial Sequence
  primer
gtaaaacgacggccagtaacaaatgtgaaaggcaaacaa

SEQ ID NO: 129375 - DNA, 22 bp, Artificial Sequence
  primer
tgggactatatgtgcacaccac

SEQ ID NO: 129376 - DNA, 22 bp, Artificial Sequence
  primer
tgtattctctttgccttcagca

SEQ ID NO: 129377 - DNA, 22 bp, Artificial Sequence
  primer
aaatttggtttgttctcctccc

SEQ ID NO: 129378 - DNA, 18 bp, Artificial Sequence
  primer
aagcccggcatgcattag

SEQ ID NO: 129379 - DNA, 21 bp, Artificial Sequence
  primer
tgttcctgactcaagccaaag

SEQ ID NO: 129380 - DNA, 36 bp, Artificial Sequence
  primer
gtaaaacgacggccagtactgcagggaagacatggg

SEQ ID NO: 129381 - DNA, 37 bp, Artificial Sequence
  primer
gtaaaacgacggccagttcgggatttgaaaccatgtg

SEQ ID NO: 129382 - DNA, 21 bp, Artificial Sequence
  primer
ggaggctttgagttgaggttg

SEQ ID NO: 129383 - DNA, 21 bp, Artificial Sequence
  primer
cccaatgtctacacctggatg

SEQ ID NO: 129384 - DNA, 21 bp, Artificial Sequence
  primer
gattgagttcacacggctcac

SEQ ID NO: 129385 - DNA, 19 bp, Artificial Sequence
  primer
cggatagctgccgagtcac

SEQ ID NO: 129386 - DNA, 21 bp, Artificial Sequence
  primer
gatgacatggcggaactcttc

SEQ ID NO: 129387 - DNA, 20 bp, Artificial Sequence
  primer
accacaggccaggacacttc

SEQ ID NO: 129388 - DNA, 21 bp, Artificial Sequence
  primer
actcagggtctaggatgcagg

SEQ ID NO: 129389 - DNA, 37 bp, Artificial Sequence
  primer
gtaaaacgacggccagtcatgtactcagccaggaggg

SEQ ID NO: 129390 - DNA, 38 bp, Artificial Sequence
  primer
gtaaaacgacggccagtccaacttcccaccttcctctc

SEQ ID NO: 129391 - DNA, 20 bp, Artificial Sequence
  primer
ctgcaatttcagcccatgtc

SEQ ID NO: 129392 - DNA, 21 bp, Artificial Sequence
  primer
agggctgaatttcgactgaac

SEQ ID NO: 129393 - DNA, 21 bp, Artificial Sequence
  primer
agtctatggtgacgtgcaagg

SEQ ID NO: 129394 - DNA, 38 bp, Artificial Sequence
  primer
gtaaaacgacggccagtgtcttgccacactcattgcac

SEQ ID NO: 129395 - DNA, 38 bp, Artificial Sequence
  primer
gtaaaacgacggccagtcatgacatcttggcaaactgg

SEQ ID NO: 129396 - DNA, 21 bp, Artificial Sequence
  primer
agagggagtcacatggtacgg

SEQ ID NO: 129397 - DNA, 21 bp, Artificial Sequence
  primer
tgtttcctacgaactttgccc

SEQ ID NO: 129398 - DNA, 25 bp, Artificial Sequence
  primer
ttaatactgatgagccatttgtcac

SEQ ID NO: 129399 - DNA, 42 bp, Artificial Sequence
  primer
gtaaaacgacggccagttgtctgatgttgaataacttcctcc

SEQ ID NO: 129400 - DNA, 21 bp, Artificial Sequence
  primer
ctgaaggatttccctcctgtg

SEQ ID NO: 129401 - DNA, 38 bp, Artificial Sequence
  primer
gtaaaacgacggccagtgtatggtttctctcccgtgtg

SEQ ID NO: 129402 - DNA, 21 bp, Artificial Sequence
  primer
gcctgacttcagtttgaaagc

SEQ ID NO: 129403 - DNA, 21 bp, Artificial Sequence
  primer
tctgatgccctctgagatttg

SEQ ID NO: 129404 - DNA, 44 bp, Artificial Sequence
  primer
gtaaaacgacggccagtactgattacaattatatggtttctccc

SEQ ID NO: 129405 - DNA, 38 bp, Artificial Sequence
  primer
gtaaaacgacggccagtatttggtggaggctgaaattg

SEQ ID NO: 129406 - DNA, 21 bp, Artificial Sequence
  primer
tgggatgcaatgaccttgtag

SEQ ID NO: 129407 - DNA, 22 bp, Artificial Sequence
  primer
cacattccataagcatgtctgg

SEQ ID NO: 129408 - DNA, 38 bp, Artificial Sequence
  primer
gtaaaacgacggccagtccaagacacagtgaccatgag

SEQ ID NO: 129409 - DNA, 21 bp, Artificial Sequence
  primer
gaaactaagctgcctttcacg

SEQ ID NO: 129410 - DNA, 38 bp, Artificial Sequence
  primer
gtaaaacgacggccagtacgcctgatctaaccctcttc

SEQ ID NO: 129411 - DNA, 38 bp, Artificial Sequence
  primer
gtaaaacgacggccagtggtatgccttcctgatctgtg

SEQ ID NO: 129412 - DNA, 20 bp, Artificial Sequence
  primer
agccaaaggaccagaagagg

SEQ ID NO: 129413 - DNA, 37 bp, Artificial Sequence
  primer
gtaaaacgacggccagtcagtttcagaacacccgagc

SEQ ID NO: 129414 - DNA, 38 bp, Artificial Sequence
  primer
gtaaaacgacggccagtaaaccctcacctctcaagcag

SEQ ID NO: 129415 - DNA, 38 bp, Artificial Sequence
  primer
gtaaaacgacggccagtagggcacagacctatcaggaa

SEQ ID NO: 129416 - DNA, 20 bp, Artificial Sequence
  primer
acctcactgtggtgcatgtg

SEQ ID NO: 129417 - DNA, 20 bp, Artificial Sequence
  primer
agaggctacaagggcaaagg

SEQ ID NO: 129418 - DNA, 21 bp, Artificial Sequence
  primer
ccaccctgacctctactgacc

SEQ ID NO: 129419 - DNA, 21 bp, Artificial Sequence
  primer
ttgctgctacaccaagaaagg

SEQ ID NO: 129420 - DNA, 21 bp, Artificial Sequence
  primer
taaagccctcatctcctcacc

SEQ ID NO: 129421 - DNA, 18 bp, Artificial Sequence
  primer
gtgtggctgcaaggaggg

SEQ ID NO: 129422 - DNA, 20 bp, Artificial Sequence
  primer
gtgctatcacgctgtccacc

SEQ ID NO: 129423 - DNA, 39 bp, Artificial Sequence
  primer
gtaaaacgacggccagttcagccatcttctcttgaaacc

SEQ ID NO: 129424 - DNA, 21 bp, Artificial Sequence
  primer
tcttgagttgcaggttgttgg

SEQ ID NO: 129425 - DNA, 38 bp, Artificial Sequence
  primer
gtaaaacgacggccagtgtgtacatgcccttgatgctc

SEQ ID NO: 129426 - DNA, 38 bp, Artificial Sequence
  primer
gtaaaacgacggccagtatctggaagagcctccaacac

SEQ ID NO: 129427 - DNA, 38 bp, Artificial Sequence
  primer
gtaaaacgacggccagttcggagacatttggttgactg

SEQ ID NO: 129428 - DNA, 38 bp, Artificial Sequence
  primer
gtaaaacgacggccagtgcccactgcagttatgtgttg

SEQ ID NO: 129429 - DNA, 21 bp, Artificial Sequence
  primer
ttcaccatgtgtgtgttccac

SEQ ID NO: 129430 - DNA, 38 bp, Artificial Sequence
  primer
gtaaaacgacggccagtagacgctagctttgtggttcc

SEQ ID NO: 129431 - DNA, 21 bp, Artificial Sequence
  primer
tctgaaggaagctgaggaacc

SEQ ID NO: 129432 - DNA, 21 bp, Artificial Sequence
  primer
tgtttctcatcaactgctggc

SEQ ID NO: 129433 - DNA, 21 bp, Artificial Sequence
  primer
gagaagtgcacctggtgtgag

SEQ ID NO: 129434 - DNA, 21 bp, Artificial Sequence
  primer
gagggagatgtgaactctggg

SEQ ID NO: 129435 - DNA, 21 bp, Artificial Sequence
  primer
tacttcctccagtcccatttg

SEQ ID NO: 129436 - DNA, 21 bp, Artificial Sequence
  primer
gcttgttgtgacttctgctcc

SEQ ID NO: 129437 - DNA, 38 bp, Artificial Sequence
  primer
gtaaaacgacggccagtaccttaattggcctgtgcatc

SEQ ID NO: 129438 - DNA, 38 bp, Artificial Sequence
  primer
gtaaaacgacggccagtgttctgcagcagtggtttgtc

SEQ ID NO: 129439 - DNA, 21 bp, Artificial Sequence
  primer
caaattgctgccagactcaag

SEQ ID NO: 129440 - DNA, 21 bp, Artificial Sequence
  primer
tgagcctttacaaattgctgc

SEQ ID NO: 129441 - DNA, 24 bp, Artificial Sequence
  primer
aaattaactgggacatttcctgtg

SEQ ID NO: 129442 - DNA, 38 bp, Artificial Sequence
  primer
gtaaaacgacggccagtctgcatagttgttcagtgccc

SEQ ID NO: 129443 - DNA, 21 bp, Artificial Sequence
  primer
tctgaatactgggattgtggg

SEQ ID NO: 129444 - DNA, 22 bp, Artificial Sequence
  primer
tttcctagaggaggaggagaaa

SEQ ID NO: 129445 - DNA, 40 bp, Artificial Sequence
  primer
gtaaaacgacggccagtggagaagctggatgagaagtaca

SEQ ID NO: 129446 - DNA, 38 bp, Artificial Sequence
  primer
gtaaaacgacggccagttggcacaataagtgtttcctg

SEQ ID NO: 129447 - DNA, 22 bp, Artificial Sequence
  primer
tggaaagtgactgatgtagccc

SEQ ID NO: 129448 - DNA, 19 bp, Artificial Sequence
  primer
aaatgctggacacgcaaac

SEQ ID NO: 129449 - DNA, 23 bp, Artificial Sequence
  primer
agcactgaattagtggtgtttcc

SEQ ID NO: 129450 - DNA, 40 bp, Artificial Sequence
  primer
gtaaaacgacggccagttgcatttcaaataatcctcgttg

SEQ ID NO: 129451 - DNA, 22 bp, Artificial Sequence
  primer
tcattaccatctttcccaatgc

SEQ ID NO: 129452 - DNA, 41 bp, Artificial Sequence
  primer
gtaaaacgacggccagtccaaagggataacacatatcaacc

SEQ ID NO: 129453 - DNA, 42 bp, Artificial Sequence
  primer
gtaaaacgacggccagtcaggtagcgggaaactattgtaaag

SEQ ID NO: 129454 - DNA, 21 bp, Artificial Sequence
  primer
acttcaagattgggcagttgg

SEQ ID NO: 129455 - DNA, 41 bp, Artificial Sequence
  primer
gtaaaacgacggccagtcatgtacagccacaataatgagaa

SEQ ID NO: 129456 - DNA, 25 bp, Artificial Sequence
  primer
tgtctcctatatttggtgactttcc

SEQ ID NO: 129457 - DNA, 24 bp, Artificial Sequence
  primer
tgaaatcagaaatccaaaggtcag

SEQ ID NO: 129458 - DNA, 38 bp, Artificial Sequence
  primer
gtaaaacgacggccagtaatctgaactccatccaaggg

SEQ ID NO: 129459 - DNA, 38 bp, Artificial Sequence
  primer
gtaaaacgacggccagtctacggccaggaggtgtagag

SEQ ID NO: 129460 - DNA, 21 bp, Artificial Sequence
  primer
taaacggcatcaagatcaagg

SEQ ID NO: 129461 - DNA, 40 bp, Artificial Sequence
  primer
gtaaaacgacggccagttgtgtattcaggcattgttgaag

SEQ ID NO: 129462 - DNA, 21 bp, Artificial Sequence
  primer
tgccagtgattagaaagggtg

SEQ ID NO: 129463 - DNA, 22 bp, Artificial Sequence
  primer
catggttcagaagacactgagg

SEQ ID NO: 129464 - DNA, 39 bp, Artificial Sequence
  primer
gtaaaacgacggccagtgctctgtggcacaattcctaac

SEQ ID NO: 129465 - DNA, 21 bp, Artificial Sequence
  primer
cccaagtcctaaatgaggctg

SEQ ID NO: 129466 - DNA, 38 bp, Artificial Sequence
  primer
gtaaaacgacggccagtgcactgcagagcattcaagag

SEQ ID NO: 129467 - DNA, 21 bp, Artificial Sequence
  primer
ataggtatgacccatcacgcc

SEQ ID NO: 129468 - DNA, 21 bp, Artificial Sequence
  primer
caggcaaggatgaatgtccag

SEQ ID NO: 129469 - DNA, 22 bp, Artificial Sequence
  primer
tgatgaaactcaagggtgattg

SEQ ID NO: 129470 - DNA, 43 bp, Artificial Sequence
  primer
gtaaaacgacggccagtttataactattactgggcccaacttt

SEQ ID NO: 129471 - DNA, 22 bp, Artificial Sequence
  primer
gaggcaaggaatcactgaagtt

SEQ ID NO: 129472 - DNA, 38 bp, Artificial Sequence
  primer
gtaaaacgacggccagtaaacaaatgaactgccctttg

SEQ ID NO: 129473 - DNA, 26 bp, Artificial Sequence
  primer
ggttccactcttcttccagaataaac

SEQ ID NO: 129474 - DNA, 22 bp, Artificial Sequence
  primer
tgacttcaagagcaccaattcc

SEQ ID NO: 129475 - DNA, 25 bp, Artificial Sequence
  primer
aacctgcacttgaaactgtaatgag

SEQ ID NO: 129476 - DNA, 21 bp, Artificial Sequence
  primer
gaacagacattctgcagagcc

SEQ ID NO: 129477 - DNA, 39 bp, Artificial Sequence
  primer
gtaaaacgacggccagtttccaaagtgtttgctctttcc

SEQ ID NO: 129478 - DNA, 21 bp, Artificial Sequence
  primer
accctctgcatgcaatgttat

SEQ ID NO: 129479 - DNA, 23 bp, Artificial Sequence
  primer
ggctaagcatatttcaaatgtca

SEQ ID NO: 129480 - DNA, 38 bp, Artificial Sequence
  primer
gtaaaacgacggccagtcccataacattccaggagcac

SEQ ID NO: 129481 - DNA, 27 bp, Artificial Sequence
  primer
agagtataagatccagtaatcacagcc

SEQ ID NO: 129482 - DNA, 39 bp, Artificial Sequence
  primer
gtaaaacgacggccagttgaaatgttcaagctttgttgg

SEQ ID NO: 129483 - DNA, 21 bp, Artificial Sequence
  primer
agcaccaaacactgggaaatc

SEQ ID NO: 129484 - DNA, 38 bp, Artificial Sequence
  primer
gtaaaacgacggccagtctgccaccacccataacttag

SEQ ID NO: 129485 - DNA, 38 bp, Artificial Sequence
  primer
gtaaaacgacggccagtttaacaaccatctgcctgtgg

SEQ ID NO: 129486 - DNA, 38 bp, Artificial Sequence
  primer
gtaaaacgacggccagtgccaaacaatgctgacagttg

SEQ ID NO: 129487 - DNA, 25 bp, Artificial Sequence
  primer
tgtaaatgcatcatttgaatcagtc

SEQ ID NO: 129488 - DNA, 20 bp, Artificial Sequence
  primer
ccttcgcttcttcagtttgg

SEQ ID NO: 129489 - DNA, 22 bp, Artificial Sequence
  primer
tttcccacaaaccctcttagtg

SEQ ID NO: 129490 - DNA, 23 bp, Artificial Sequence
  primer
aaccgtacatctgttctttgctg

SEQ ID NO: 129491 - DNA, 38 bp, Artificial Sequence
  primer
gtaaaacgacggccagtccagagcaagaatctttgacg

SEQ ID NO: 129492 - DNA, 41 bp, Artificial Sequence
  primer
gtaaaacgacggccagtatgagtttcaatgaggtgacaaga

SEQ ID NO: 129493 - DNA, 40 bp, Artificial Sequence
  primer
gtaaaacgacggccagtacaatgttgcacctaggctattc

SEQ ID NO: 129494 - DNA, 40 bp, Artificial Sequence
  primer
gtaaaacgacggccagtcctctgagtctacaagaacaacc

SEQ ID NO: 129495 - DNA, 25 bp, Artificial Sequence
  primer
tgagtcctccaacttctctataagg

SEQ ID NO: 129496 - DNA, 21 bp, Artificial Sequence
  primer
tgaggaggaggcgattacttg

SEQ ID NO: 129497 - DNA, 21 bp, Artificial Sequence
  primer
acaaatggcatcaacatctgg

SEQ ID NO: 129498 - DNA, 40 bp, Artificial Sequence
  primer
gtaaaacgacggccagttgtcccaagatttagcaaacaac

SEQ ID NO: 129499 - DNA, 38 bp, Artificial Sequence
  primer
gtaaaacgacggccagtgtaactgtcccatcgattcgc

SEQ ID NO: 129500 - DNA, 41 bp, Artificial Sequence
  primer
gtaaaacgacggccagtaattcggtaaactctatccacagc

SEQ ID NO: 129501 - DNA, 38 bp, Artificial Sequence
  primer
gtaaaacgacggccagtagcatgcaaagactgaagctg

SEQ ID NO: 129502 - DNA, 38 bp, Artificial Sequence
  primer
gtaaaacgacggccagtggctgaggctgtggtttattc

SEQ ID NO: 129503 - DNA, 25 bp, Artificial Sequence
  primer
cagcactacctgtacctttaccatc

SEQ ID NO: 129504 - DNA, 21 bp, Artificial Sequence
  primer
ggtgaagatgctgaaggttcc

SEQ ID NO: 129505 - DNA, 21 bp, Artificial Sequence
  primer
tctggaattaggtgcagagcc

SEQ ID NO: 129506 - DNA, 21 bp, Artificial Sequence
  primer
aagaaccttcctggtggactg

SEQ ID NO: 129507 - DNA, 38 bp, Artificial Sequence
  primer
gtaaaacgacggccagttatacttggaggcttcgccac

SEQ ID NO: 129508 - DNA, 38 bp, Artificial Sequence
  primer
gtaaaacgacggccagttaagcagtttagggcctcctg

SEQ ID NO: 129509 - DNA, 38 bp, Artificial Sequence
  primer
gtaaaacgacggccagtagcctgaatgcttcatgttcc

SEQ ID NO: 129510 - DNA, 21 bp, Artificial Sequence
  primer
gagctgactcccacaccctac

SEQ ID NO: 129511 - DNA, 21 bp, Artificial Sequence
  primer
tggtgctcaaagagttggttg

SEQ ID NO: 129512 - DNA, 21 bp, Artificial Sequence
  primer
cagcagcacatgattcacaag

SEQ ID NO: 129513 - DNA, 38 bp, Artificial Sequence
  primer
gtaaaacgacggccagttgaggaggaggcgattacttg

SEQ ID NO: 129514 - DNA, 38 bp, Artificial Sequence
  primer
gtaaaacgacggccagtacaaatggcatcaacatctgg

SEQ ID NO: 129515 - DNA, 40 bp, Artificial Sequence; identical to SEQ ID NO: 129498
  primer

SEQ ID NO: 129516 - DNA, 38 bp, Artificial Sequence; identical to SEQ ID NO: 129499
  primer

SEQ ID NO: 129517 - DNA, 41 bp, Artificial Sequence; identical to SEQ ID NO: 129500
  primer

SEQ ID NO: 129518 - DNA, 21 bp, Artificial Sequence
  primer
agcatgcaaagactgaagctg

SEQ ID NO: 129519 - DNA, 21 bp, Artificial Sequence
  primer
ggctgaggctgtggtttattc

SEQ ID NO: 129520 - DNA, 25 bp, Artificial Sequence
  primer
cagcactacctgtacctttaccatc

SEQ ID NO: 129521 - DNA, 21 bp, Artificial Sequence
  primer
ggtgaagatgctgaaggttcc

SEQ ID NO: 129522 - DNA, 20 bp, Artificial Sequence
  primer
gctatgcacaaaccctgctc

SEQ ID NO: 129523 - DNA, 38 bp, Artificial Sequence
  primer
gtaaaacgacggccagtcttcaggaccctttgcttcac

SEQ ID NO: 129524 - DNA, 21 bp, Artificial Sequence
  primer
taagcagtttagggcctcctg

SEQ ID NO: 129525 - DNA, 38 bp, Artificial Sequence; identical to SEQ ID NO: 129509
  primer

SEQ ID NO: 129526 - DNA, 22 bp, Artificial Sequence
  primer
gaaattcccaaacttccacaag

SEQ ID NO: 129527 - DNA, 44 bp, Artificial Sequence
  primer
gtaaaacgacggccagtaatgcttctttcctgttcaaattatac

SEQ ID NO: 129528 - DNA, 36 bp, Artificial Sequence
  primer
gtaaaacgacggccagtcagagggcactggttctgg

SEQ ID NO: 129529 - DNA, 41 bp, Artificial Sequence
  primer
gtaaaacgacggccagttctcaggcatataaggatttcgac

SEQ ID NO: 129530 - DNA, 21 bp, Artificial Sequence
  primer
tgcctctcagcatttcatagc

SEQ ID NO: 129531 - DNA, 20 bp, Artificial Sequence
  primer
gggcttaaggtgggacattt

SEQ ID NO: 129532 - DNA, 41 bp, Artificial Sequence
  primer
gtaaaacgacggccagttcagcaattataaatgggttcaag

SEQ ID NO: 129533 - DNA, 21 bp, Artificial Sequence
  primer
gaaggtaaaggtgtgctgctg

SEQ ID NO: 129534 - DNA, 22 bp, Artificial Sequence
  primer
ggtgatagagcaagaccctgtc

SEQ ID NO: 129535 - DNA, 21 bp, Artificial Sequence
  primer
aggctgatgaaaggaatttgg

SEQ ID NO: 129536 - DNA, 36 bp, Artificial Sequence
  primer
gtaaaacgacggccagtccctctgttcctggaatgc

SEQ ID NO: 129537 - DNA, 38 bp, Artificial Sequence
  primer
gtaaaacgacggccagttgcgttaagcaacacccatac

SEQ ID NO: 129538 - DNA, 22 bp, Artificial Sequence
  primer
gctacaaagacagcaccacctc

SEQ ID NO: 129539 - DNA, 21 bp, Artificial Sequence
  primer
gagtcccaacttcatccttgg

SEQ ID NO: 129540 - DNA, 38 bp, Artificial Sequence
  primer
gtaaaacgacggccagtttgagtgagttcgtgccaaag

SEQ ID NO: 129541 - DNA, 38 bp, Artificial Sequence
  primer
gtaaaacgacggccagttcacacatctgaaccttgctg

SEQ ID NO: 129542 - DNA, 22 bp, Artificial Sequence
  primer
tggagaaactttgtacagcagg

SEQ ID NO: 129543 - DNA, 22 bp, Artificial Sequence
  primer
gaaggaaagcccaaataggaaa

SEQ ID NO: 129544 - DNA, 43 bp, Artificial Sequence
  primer
gtaaaacgacggccagtggagtttattaggaagatcattcagc

SEQ ID NO: 129545 - DNA, 26 bp, Artificial Sequence
  primer
tttacccattcagtatttgacagaag

SEQ ID NO: 129546 - DNA, 21 bp, Artificial Sequence
  primer
gtgtctgtgtcctcttctggg

SEQ ID NO: 129547 - DNA, 21 bp, Artificial Sequence
  primer
gctctgttgcaagctgattcc

SEQ ID NO: 129548 - DNA, 22 bp, Artificial Sequence
  primer
ggatagagagagccataggcag

SEQ ID NO: 129549 - DNA, 21 bp, Artificial Sequence
  primer
tgttggcaaagtaacggtgtc

SEQ ID NO: 129550 - DNA, 21 bp, Artificial Sequence
  primer
gatgtgggtgtagtcgatccc

SEQ ID NO: 129551 - DNA, 38 bp, Artificial Sequence
  primer
gtaaaacgacggccagtaacagcactgagccatactgc

SEQ ID NO: 129552 - DNA, 38 bp, Artificial Sequence
  primer
gtaaaacgacggccagtttccactccaaccctatcctc

SEQ ID NO: 129553 - DNA, 38 bp, Artificial Sequence
  primer
gtaaaacgacggccagtgaatcagatgctgaaggccac

SEQ ID NO: 129554 - DNA, 25 bp, Artificial Sequence
  primer
tggattgtttattgaggtattgctg

SEQ ID NO: 129555 - DNA, 22 bp, Artificial Sequence
  primer
taccacttctaggcttctcggg

SEQ ID NO: 129556 - DNA, 40 bp, Artificial Sequence
  primer
gtaaaacgacggccagtaattgtttgcatgtctatttccc

SEQ ID NO: 129557 - DNA, 35 bp, Artificial Sequence
  primer
gtaaaacgacggccagtaggcatatcctggctggg

SEQ ID NO: 129558 - DNA, 21 bp, Artificial Sequence
  primer
tgggaaggagaggtggtattc

SEQ ID NO: 129559 - DNA, 21 bp, Artificial Sequence
  primer
agtgcttcaatttcatggtgc

SEQ ID NO: 129560 - DNA, 21 bp, Artificial Sequence
  primer
tgagcccaaagatgggtttag

SEQ ID NO: 129561 - DNA, 18 bp, Artificial Sequence
  primer
gcaaagcagagctcccag

SEQ ID NO: 129562 - DNA, 21 bp, Artificial Sequence
  primer
cttagcaatgaaaggaagccg

SEQ ID NO: 129563 - DNA, 21 bp, Artificial Sequence
  primer
aaacaaaccacacgaccacag

SEQ ID NO: 129564 - DNA, 21 bp, Artificial Sequence
  primer
gggagggagtgacaaggaaac

SEQ ID NO: 129565 - DNA, 21 bp, Artificial Sequence
  primer
ctgagagagagccagaggctg

SEQ ID NO: 129566 - DNA, 21 bp, Artificial Sequence
  primer
cacatctgaatgtgagcccag

SEQ ID NO: 129567 - DNA, 39 bp, Artificial Sequence
  primer
gtaaaacgacggccagtgacttacgtgcccttacacacc

SEQ ID NO: 129568 - DNA, 38 bp, Artificial Sequence
  primer
gtaaaacgacggccagtggtgacacctctcacacccac

SEQ ID NO: 129569 - DNA, 22 bp, Artificial Sequence
  primer
ccagaggagaagagggtactgg

SEQ ID NO: 129570 - DNA, 21 bp, Artificial Sequence
  primer
gcagaacacctgtttgctttg

SEQ ID NO: 129571 - DNA, 19 bp, Artificial Sequence
  primer
ctcacacacgaagcccttg

SEQ ID NO: 129572 - DNA, 38 bp, Artificial Sequence
  primer
gtaaaacgacggccagtatctcagggtcagcaaagacc

SEQ ID NO: 129573 - DNA, 36 bp, Artificial Sequence
  primer
gtaaaacgacggccagtccggagcagaaggaacaac

SEQ ID NO: 129574 - DNA, 39 bp, Artificial Sequence
  primer
gtaaaacgacggccagttttgtctccctgcaactttctc

SEQ ID NO: 129575 - DNA, 21 bp, Artificial Sequence
  primer
agaacatggatggctttgtcc

SEQ ID NO: 129576 - DNA, 21 bp, Artificial Sequence
  primer
ttcttggagcatctctgtccc

SEQ ID NO: 129577 - DNA, 21 bp, Artificial Sequence
  primer
gcagtaggcttagacgcaagg

SEQ ID NO: 129578 - DNA, 21 bp, Artificial Sequence
  primer
gagccacaggctaccttcttc

SEQ ID NO: 129579 - DNA, 38 bp, Artificial Sequence
  primer
gtaaaacgacggccagtgtaggatgttcacagccctgg

SEQ ID NO: 129580 - DNA, 21 bp, Artificial Sequence
  primer
ctgcagtgagccaagatcaag

SEQ ID NO: 129581 - DNA, 38 bp, Artificial Sequence
  primer
gtaaaacgacggccagtgtcttcttgggtaactggccc

SEQ ID NO: 129582 - DNA, 21 bp, Artificial Sequence
  primer
gcaacacagcagttccaattc

SEQ ID NO: 129583 - DNA, 36 bp, Artificial Sequence
  primer
gtaaaacgacggccagttgggtcctgcttacaaggg

SEQ ID NO: 129584 - DNA, 42 bp, Artificial Sequence
  primer
gtaaaacgacggccagtcacgtatcaagagtcaagaatttgc

SEQ ID NO: 129585 - DNA, 38 bp, Artificial Sequence
  primer
gtaaaacgacggccagttgacctcctacccttagccag

SEQ ID NO: 129586 - DNA, 23 bp, Artificial Sequence
  primer
gcaaattcagaccacaatctttc

SEQ ID NO: 129587 - DNA, 22 bp, Artificial Sequence
  primer
aagcaaataacacgaggcagag

SEQ ID NO: 129588 - DNA, 41 bp, Artificial Sequence
  primer
gtaaaacgacggccagtaaagaaccatgtctcaatcctctc

SEQ ID NO: 129589 - DNA, 19 bp, Artificial Sequence
  primer
gtgacagcccagaatcacc

SEQ ID NO: 129590 - DNA, 38 bp, Artificial Sequence
  primer
gtaaaacgacggccagtactgccattgtcactttgagc

SEQ ID NO: 129591 - DNA, 23 bp, Artificial Sequence
  primer
aattaacccaaaccattccattc

SEQ ID NO: 129592 - DNA, 39 bp, Artificial Sequence
  primer
gtaaaacgacggccagttgtcttaacatggatgagctgc

SEQ ID NO: 129593 - DNA, 21 bp, Artificial Sequence
  primer
aatttcaccactgcactctgg

SEQ ID NO: 129594 - DNA, 21 bp, Artificial Sequence
  primer
gacagggctctgcatccttac

SEQ ID NO: 129595 - DNA, 21 bp, Artificial Sequence
  primer
cccagaaagcagaggttgaag

SEQ ID NO: 129596 - DNA, 38 bp, Artificial Sequence
  primer
gtaaaacgacggccagtgggaatcagtggcttacgttc

SEQ ID NO: 129597 - DNA, 21 bp, Artificial Sequence
  primer
atgtcctgtgtcctccattcc

SEQ ID NO: 129598 - DNA, 21 bp, Artificial Sequence
  primer
tcctagagggctctgctcatc

SEQ ID NO: 129599 - DNA, 38 bp, Artificial Sequence
  primer
gtaaaacgacggccagttaagtggaatactgccagcgg

SEQ ID NO: 129600 - DNA, 38 bp, Artificial Sequence
  primer
gtaaaacgacggccagtagacgattaaggaagcccttg

SEQ ID NO: 129601 - DNA, 21 bp, Artificial Sequence
  primer
caggactgatgaacgcttctg

SEQ ID NO: 129602 - DNA, 38 bp, Artificial Sequence
  primer
gtaaaacgacggccagtcatacagggagaggccttgac

SEQ ID NO: 129603 - DNA, 21 bp, Artificial Sequence
  primer
aaccaagagggtagtgatggg

SEQ ID NO: 129604 - DNA, 21 bp, Artificial Sequence
  primer
tttagagactcctggatgccc

SEQ ID NO: 129605 - DNA, 21 bp, Artificial Sequence
  primer
tggctgactcctctcctcttc

SEQ ID NO: 129606 - DNA, 21 bp, Artificial Sequence
  primer
ttctctcctccagtttctggc

SEQ ID NO: 129607 - DNA, 21 bp, Artificial Sequence
  primer
tcaactccacaatcatgtccc

SEQ ID NO: 129608 - DNA, 38 bp, Artificial Sequence
  primer
gtaaaacgacggccagtagtctgaaactcctggccttg

SEQ ID NO: 129609 - DNA, 38 bp, Artificial Sequence
  primer
gtaaaacgacggccagtccgttgagaatatgcgagatg

SEQ ID NO: 129610 - DNA, 21 bp, Artificial Sequence
  primer
cagaaacagtgagcacatgcc

SEQ ID NO: 129611 - DNA, 21 bp, Artificial Sequence
  primer
cccggcccaatatttctttag

SEQ ID NO: 129612 - DNA, 38 bp, Artificial Sequence
  primer
gtaaaacgacggccagtaaggaatcacacagcaaccag

SEQ ID NO: 129613 - DNA, 37 bp, Artificial Sequence
  primer
gtaaaacgacggccagtttcagcaatggcaggtaagg

SEQ ID NO: 129614 - DNA, 20 bp, Artificial Sequence
  primer
ctaagcgcaatctggagcag

SEQ ID NO: 129615 - DNA, 20 bp, Artificial Sequence
  primer
cctgaggacagagcgatacc

SEQ ID NO: 129616 - DNA, 37 bp, Artificial Sequence
  primer
gtaaaacgacggccagtgcactcaggcaatggaagag

SEQ ID NO: 129617 - DNA, 21 bp, Artificial Sequence
  primer
cccttaccctgttcattgtgg

SEQ ID NO: 129618 - DNA, 21 bp, Artificial Sequence
  primer
ttcctcctagaacgcttcgac

SEQ ID NO: 129619 - DNA, 21 bp, Artificial Sequence
  primer
gaaacatctgctgagtgcagg

SEQ ID NO: 129620 - DNA, 38 bp, Artificial Sequence
  primer
gtaaaacgacggccagtggattcggaagctgtaagacc

SEQ ID NO: 129621 - DNA, 38 bp, Artificial Sequence
  primer
gtaaaacgacggccagtatcttgaggcacagagatcgg

SEQ ID NO: 129622 - DNA, 38 bp, Artificial Sequence
  primer
gtaaaacgacggccagtatctaacggagaatccagggc

SEQ ID NO: 129623 - DNA, 37 bp, Artificial Sequence
  primer
gtaaaacgacggccagtcctgtgaggcaccaactagg

SEQ ID NO: 129624 - DNA, 38 bp, Artificial Sequence
  primer
gtaaaacgacggccagtggtgggagacagaggactagc

SEQ ID NO: 129625 - DNA, 21 bp, Artificial Sequence
  primer
acccagaggcacaagtcagag

SEQ ID NO: 129626 - DNA, 38 bp, Artificial Sequence
  primer
gtaaaacgacggccagtcccacctcctatagctctccc

SEQ ID NO: 129627 - DNA, 24 bp, Artificial Sequence
  primer
tcacagagtgagaatgtgacagag

SEQ ID NO: 129628 - DNA, 21 bp, Artificial Sequence
  primer
acttgctgtagcacgtctccc

SEQ ID NO: 129629 - DNA, 38 bp, Artificial Sequence
  primer
gtaaaacgacggccagtgggaaagtgtattgggaaggg

SEQ ID NO: 129630 - DNA, 21 bp, Artificial Sequence
  primer
tggctctgtcccttaagaagc

SEQ ID NO: 129631 - DNA, 38 bp, Artificial Sequence
  primer
gtaaaacgacggccagtgcagagaacttggccctaaac

SEQ ID NO: 129632 - DNA, 38 bp, Artificial Sequence
  primer
gtaaaacgacggccagtctcacctcagtgatgacgctc

SEQ ID NO: 129633 - DNA, 21 bp, Artificial Sequence
  primer
tgtagtacagaggcacgtccg

SEQ ID NO: 129634 - DNA, 21 bp, Artificial Sequence
  primer
gttggcctcaagtgatcttcc

SEQ ID NO: 129635 - DNA, 21 bp, Artificial Sequence
  primer
ggcagaggtcagaggttaggg

SEQ ID NO: 129636 - DNA, 21 bp, Artificial Sequence
  primer
tctcacttgaagaatgggcac

SEQ ID NO: 129637 - DNA, 21 bp, Artificial Sequence
  primer
ctctcctccatagcttcgtcg

SEQ ID NO: 129638 - DNA, 20 bp, Artificial Sequence
  primer
cactcccaaacacttgcctg

SEQ ID NO: 129639 - DNA, 21 bp, Artificial Sequence
  primer
cagactcaacactccagccag

SEQ ID NO: 129640 - DNA, 21 bp, Artificial Sequence
  primer
tcgatagcgttgagaacttgg

SEQ ID NO: 129641 - DNA, 20 bp, Artificial Sequence
  primer
gcatggtattgcagcacgag

SEQ ID NO: 129642 - DNA, 38 bp, Artificial Sequence
  primer
gtaaaacgacggccagtcactgaggagcacgtagatgg

SEQ ID NO: 129643 - DNA, 18 bp, Artificial Sequence
  primer
ggacagcacagccagcag

SEQ ID NO: 129644 - DNA, 21 bp, Artificial Sequence
  primer
actacaggaggttcaccgtgg

SEQ ID NO: 129645 - DNA, 35 bp, Artificial Sequence
  primer
gtaaaacgacggccagtctccaagctgatccgcac

SEQ ID NO: 129646 - DNA, 36 bp, Artificial Sequence
  primer
gtaaaacgacggccagtcttccctggagctgtctgc

SEQ ID NO: 129647 - DNA, 21 bp, Artificial Sequence
  primer
ttcctgaactcctctcaaccc

SEQ ID NO: 129648 - DNA, 38 bp, Artificial Sequence
  primer
gtaaaacgacggccagtatcacccatggaaatcaggac

SEQ ID NO: 129649 - DNA, 21 bp, Artificial Sequence
  primer
ctgctggaaacagaaccactg

SEQ ID NO: 129650 - DNA, 38 bp, Artificial Sequence
  primer
gtaaaacgacggccagtcccaaacctgagtccaacaac

SEQ ID NO: 129651 - DNA, 37 bp, Artificial Sequence
  primer
gtaaaacgacggccagtccgatccaggtatgtgatgg

SEQ ID NO: 129652 - DNA, 21 bp, Artificial Sequence
  primer
ctaaggtggtgggagaagctg

SEQ ID NO: 129653 - DNA, 21 bp, Artificial Sequence
  primer
ctcagatctaggatggctggg

SEQ ID NO: 129654 - DNA, 21 bp, Artificial Sequence
  primer
aggcctttgtcagcagatagg

SEQ ID NO: 129655 - DNA, 21 bp, Artificial Sequence
  primer
aaagaccctccacctaccacc

SEQ ID NO: 129656 - DNA, 21 bp, Artificial Sequence
  primer
gaatccagagcttccatcctg

SEQ ID NO: 129657 - DNA, 21 bp, Artificial Sequence
  primer
ggaatgtgatacaggcccaac

SEQ ID NO: 129658 - DNA, 21 bp, Artificial Sequence
  primer
gacaaagatgtgtgctgctgg

SEQ ID NO: 129659 - DNA, 21 bp, Artificial Sequence
  primer
cccacttagctcccaagaaac

SEQ ID NO: 129660 - DNA, 21 bp, Artificial Sequence
  primer
ccctaaagactcaggccacac

SEQ ID NO: 129661 - DNA, 38 bp, Artificial Sequence
  primer
gtaaaacgacggccagttggatagagatggcttgtccc

SEQ ID NO: 129662 - DNA, 21 bp, Artificial Sequence
  primer
tgcctaggagagaactcaggc

SEQ ID NO: 129663 - DNA, 18 bp, Artificial Sequence
  primer
accactggaggaggtggc

SEQ ID NO: 129664 - DNA, 38 bp, Artificial Sequence
  primer
gtaaaacgacggccagtcagctatttctcctcttgccc

SEQ ID NO: 129665 - DNA, 39 bp, Artificial Sequence
  primer
gtaaaacgacggccagtttcctcatccaggaggctattc

SEQ ID NO: 129666 - DNA, 38 bp, Artificial Sequence
  primer
gtaaaacgacggccagtggagacaccacttcatccctg

SEQ ID NO: 129667 - DNA, 39 bp, Artificial Sequence
  primer
gtaaaacgacggccagtgaaaccactcaggcttcaacac

SEQ ID NO: 129668 - DNA, 21 bp, Artificial Sequence
  primer
cagctcctcggaaaggtagtg

SEQ ID NO: 129669 - DNA, 38 bp, Artificial Sequence
  primer
gtaaaacgacggccagtaaccttccctgctacattccc

SEQ ID NO: 129670 - DNA, 21 bp, Artificial Sequence
  primer
taaggagagaggcaagggacc

SEQ ID NO: 129671 - DNA, 38 bp, Artificial Sequence
  primer
gtaaaacgacggccagtgttggcagcacctcaagaatc

SEQ ID NO: 129672 - DNA, 39 bp, Artificial Sequence
  primer
gtaaaacgacggccagtaagaccttgggacactttcctc

SEQ ID NO: 129673 - DNA, 21 bp, Artificial Sequence
  primer
ccacatagatgtgatgagccc

SEQ ID NO: 129674 - DNA, 21 bp, Artificial Sequence
  primer
ggtctggatttggatctgctg

SEQ ID NO: 129675 - DNA, 21 bp, Artificial Sequence
  primer
aataaacagggatggtccagg

SEQ ID NO: 129676 - DNA, 21 bp, Artificial Sequence
  primer
ctgtggtggtggtgtctgttc

SEQ ID NO: 129677 - DNA, 38 bp, Artificial Sequence
  primer
gtaaaacgacggccagtaaataagccagaggttgcgag

SEQ ID NO: 129678 - DNA, 25 bp, Artificial Sequence
  primer
aggtcagtactgcttgttactaggc

SEQ ID NO: 129679 - DNA, 21 bp, Artificial Sequence
  primer
ctcctgacctcaagtgatcca

SEQ ID NO: 129680 - DNA, 21 bp, Artificial Sequence
  primer
ccctatcagggcaagtagcac

SEQ ID NO: 129681 - DNA, 21 bp, Artificial Sequence
  primer
ttagggctttcagtagcccag

SEQ ID NO: 129682 - DNA, 21 bp, Artificial Sequence
  primer
cactagcctcacaggcacaag

SEQ ID NO: 129683 - DNA, 21 bp, Artificial Sequence
  primer
atcacacacctttggaaagcc

SEQ ID NO: 129684 - DNA, 21 bp, Artificial Sequence
  primer
cagcctgaaaggcttcgtaac

SEQ ID NO: 129685 - DNA, 21 bp, Artificial Sequence
  primer
gcggatctcgtagttgttgag

SEQ ID NO: 129686 - DNA, 38 bp, Artificial Sequence
  primer
gtaaaacgacggccagtgtagacgatcacgtccagcac

SEQ ID NO: 129687 - DNA, 20 bp, Artificial Sequence
  primer
cagtgccgttgaggttgttc

SEQ ID NO: 129688 - DNA, 38 bp, Artificial Sequence
  primer
gtaaaacgacggccagtcttcagcacctaccagctcag

SEQ ID NO: 129689 - DNA, 22 bp, Artificial Sequence
  primer
gagccaggcacacagtaaattc

SEQ ID NO: 129690 - DNA, 21 bp, Artificial Sequence
  primer
cactttcaggttgcatgtgtg

SEQ ID NO: 129691 - DNA, 21 bp, Artificial Sequence
  primer
ttgtacttgggttccgattcc

SEQ ID NO: 129692 - DNA, 21 bp, Artificial Sequence
  primer
agtctcaccgcttagggtctg

SEQ ID NO: 129693 - DNA, 21 bp, Artificial Sequence
  primer
tcgaggactccaaagtcacac

SEQ ID NO: 129694 - DNA, 21 bp, Artificial Sequence
  primer
ggttggagctagggagtaggg

SEQ ID NO: 129695 - DNA, 39 bp, Artificial Sequence
  primer
gtaaaacgacggccagtttaaggctgagattggaacctg

SEQ ID NO: 129696 - DNA, 21 bp, Artificial Sequence
  primer
ctgcctactttcatccaaccc

SEQ ID NO: 129697 - DNA, 21 bp, Artificial Sequence
  primer
gacggttcagctctgtgtctg

SEQ ID NO: 129698 - DNA, 21 bp, Artificial Sequence
  primer
cagagcgcagtgtaaatcctg

SEQ ID NO: 129699 - DNA, 21 bp, Artificial Sequence
  primer
gcccagagtccctatgcttac

SEQ ID NO: 129700 - DNA, 21 bp, Artificial Sequence
  primer
cttcacatttcacagcccttg

SEQ ID NO: 129701 - DNA, 21 bp, Artificial Sequence
  primer
accggaaacaggttgaaagtg

SEQ ID NO: 129702 - DNA, 21 bp, Artificial Sequence
  primer
caggtcctcttccagaaccac

SEQ ID NO: 129703 - DNA, 21 bp, Artificial Sequence
  primer
acacctgccatcctacctttg

SEQ ID NO: 129704 - DNA, 38 bp, Artificial Sequence
  primer
gtaaaacgacggccagtcggtacagtagtgctgggtcc

SEQ ID NO: 129705 - DNA, 38 bp, Artificial Sequence
  primer
gtaaaacgacggccagtgatgccaaagtggtaggatcg

SEQ ID NO: 129706 - DNA, 41 bp, Artificial Sequence
  primer
gtaaaacgacggccagtaagattgcttcagagtccatgttc

SEQ ID NO: 129707 - DNA, 38 bp, Artificial Sequence
  primer
gtaaaacgacggccagtggagtaaacacacaggcccag

SEQ ID NO: 129708 - DNA, 21 bp, Artificial Sequence
  primer
tctcctgacctcatgatccac

SEQ ID NO: 129709 - DNA, 20 bp, Artificial Sequence
  primer
caaaggctccctggatcttg

SEQ ID NO: 129710 - DNA, 38 bp, Artificial Sequence
  primer
gtaaaacgacggccagtgactgagggtggcttcttcac

SEQ ID NO: 129711 - DNA, 20 bp, Artificial Sequence
  primer
ctacaggatggagggaaggg

SEQ ID NO: 129712 - DNA, 37 bp, Artificial Sequence
  primer
gtaaaacgacggccagtggctgggacttgtaagaggc

SEQ ID NO: 129713 - DNA, 38 bp, Artificial Sequence
  primer
gtaaaacgacggccagtagaaggcattagtgggctgtg

SEQ ID NO: 129714 - DNA, 40 bp, Artificial Sequence
  primer
gtaaaacgacggccagttctgctgttaacccattctaagg

SEQ ID NO: 129715 - DNA, 38 bp, Artificial Sequence
  primer
gtaaaacgacggccagtgggccaaagtgctgttcatac

SEQ ID NO: 129716 - DNA, 20 bp, Artificial Sequence
  primer
agatcacaccactgggcaac

SEQ ID NO: 129717 - DNA, 21 bp, Artificial Sequence
  primer
caacctgacttccaaggtgac

SEQ ID NO: 129718 - DNA, 38 bp, Artificial Sequence
  primer
gtaaaacgacggccagtctggagggtttcagaatcgac

SEQ ID NO: 129719 - DNA, 21 bp, Artificial Sequence
  primer
agcctgatgtaagcggaagtc

SEQ ID NO: 129720 - DNA, 38 bp, Artificial Sequence
  primer
gtaaaacgacggccagtatctgactcagttgccaaccc

SEQ ID NO: 129721 - DNA, 21 bp, Artificial Sequence
  primer
ttgatggcacactctcaaagg

SEQ ID NO: 129722 - DNA, 21 bp, Artificial Sequence
  primer
gcaagggatgcagaagatagg

SEQ ID NO: 129723 - DNA, 38 bp, Artificial Sequence
  primer
gtaaaacgacggccagtgagatcagaagcagatgcgtg

SEQ ID NO: 129724 - DNA, 38 bp, Artificial Sequence
  primer
gtaaaacgacggccagtaggaccagagaggcacagaac

SEQ ID NO: 129725 - DNA, 38 bp, Artificial Sequence
  primer
gtaaaacgacggccagtcattgtagctccaacagtggc

SEQ ID NO: 129726 - DNA, 38 bp, Artificial Sequence
  primer
gtaaaacgacggccagtcccactaggaaacaatgccag

SEQ ID NO: 129727 - DNA, 21 bp, Artificial Sequence
  primer
atgccaagacaccatcacatc

SEQ ID NO: 129728 - DNA, 38 bp, Artificial Sequence
  primer
gtaaaacgacggccagtaggtgcagaaatggcatgtag

SEQ ID NO: 129729 - DNA, 21 bp, Artificial Sequence
  primer
gtgcctcacctagcaatgacc

SEQ ID NO: 129730 - DNA, 21 bp, Artificial Sequence
  primer
atggatgggcttgactacagc

SEQ ID NO: 129731 - DNA, 38 bp, Artificial Sequence
  primer
gtaaaacgacggccagtaatgaggcaggctctagatgg

SEQ ID NO: 129732 - DNA, 37 bp, Artificial Sequence
  primer
gtaaaacgacggccagtgaggtgctgctctggttgag

SEQ ID NO: 129733 - DNA, 38 bp, Artificial Sequence
  primer
gtaaaacgacggccagtatgcatcctgagtgggaagtg

SEQ ID NO: 129734 - DNA, 38 bp, Artificial Sequence
  primer
gtaaaacgacggccagtcaccagtgcaacgtttgtctc

SEQ ID NO: 129735 - DNA, 38 bp, Artificial Sequence
  primer
gtaaaacgacggccagtcagttcccagtcagctgtgag

SEQ ID NO: 129736 - DNA, 38 bp, Artificial Sequence
  primer
gtaaaacgacggccagtaaggagtctgccattgtttcc

SEQ ID NO: 129737 - DNA, 21 bp, Artificial Sequence
  primer
aacagagcatctgtggctgag

SEQ ID NO: 129738 - DNA, 21 bp, Artificial Sequence
  primer
aaaccaacttcatcattgggc

SEQ ID NO: 129739 - DNA, 38 bp, Artificial Sequence
  primer
gtaaaacgacggccagtcctcagaggactggaggagat

SEQ ID NO: 129740 - DNA, 38 bp, Artificial Sequence
  primer
gtaaaacgacggccagtcaaacatgcagggttgatgag

SEQ ID NO: 129741 - DNA, 38 bp, Artificial Sequence
  primer
gtaaaacgacggccagtagttgttagcatgggctctgg

SEQ ID NO: 129742 - DNA, 21 bp, Artificial Sequence
  primer
atggccaaagacactgaacac

SEQ ID NO: 129743 - DNA, 18 bp, Artificial Sequence
  primer
cacctaggcctcgcaaag

SEQ ID NO: 129744 - DNA, 38 bp, Artificial Sequence
  primer
gtaaaacgacggccagtatgcccacttcttatttggct

SEQ ID NO: 129745 - DNA, 21 bp, Artificial Sequence
  primer
gtgctctgtgaacagaaaggg

SEQ ID NO: 129746 - DNA, 38 bp, Artificial Sequence
  primer
gtaaaacgacggccagtacagaaagaacaatgtggccc

SEQ ID NO: 129747 - DNA, 22 bp, Artificial Sequence
  primer
aagaaaccaattctagggcctg

SEQ ID NO: 129748 - DNA, 38 bp, Artificial Sequence
  primer
gtaaaacgacggccagtgggtccctcttaaagaccagc

SEQ ID NO: 129749 - DNA, 21 bp, Artificial Sequence
  primer
gcgtcaaatctatacccagcc

SEQ ID NO: 129750 - DNA, 36 bp, Artificial Sequence
  primer
gtaaaacgacggccagttgggactggtaggtggctg

SEQ ID NO: 129751 - DNA, 38 bp, Artificial Sequence
  primer
gtaaaacgacggccagtacacaactcagaggagcctga

SEQ ID NO: 129752 - DNA, 38 bp, Artificial Sequence
  primer
gtaaaacgacggccagtcctgcaaactgaagcacagac

SEQ ID NO: 129753 - DNA, 18 bp, Artificial Sequence
  primer
ggtcctctcagcccaagg

SEQ ID NO: 129754 - DNA, 38 bp, Artificial Sequence
  primer
gtaaaacgacggccagtcgatttaggatcgggaaactg

SEQ ID NO: 129755 - DNA, 44 bp, Artificial Sequence
  primer
gtaaaacgacggccagtaatagaggtcttgctattctctcaaag

SEQ ID NO: 129756 - DNA, 21 bp, Artificial Sequence
  primer
tgaaacaatgaccttccatgc

SEQ ID NO: 129757 - DNA, 21 bp, Artificial Sequence
  primer
cacgatatgcaaggcattcta

SEQ ID NO: 129758 - DNA, 21 bp, Artificial Sequence
  primer
aacacacacacacccacaatc

SEQ ID NO: 129759 - DNA, 43 bp, Artificial Sequence
  primer
gtaaaacgacggccagttctcagaaggctgtactcttattctg

SEQ ID NO: 129760 - DNA, 21 bp, Artificial Sequence
  primer
cctgggcataaataggaaagg

SEQ ID NO: 129761 - DNA, 44 bp, Artificial Sequence
  primer
gtaaaacgacggccagttccttgtgtacagtggaactaaataag

SEQ ID NO: 129762 - DNA, 21 bp, Artificial Sequence
  primer
aatgtgctcagatgctggatg

SEQ ID NO: 129763 - DNA, 20 bp, Artificial Sequence
  primer
cgccacttccaaattagtgg

SEQ ID NO: 129764 - DNA, 27 bp, Artificial Sequence
  primer
aagagacactgaaattgtttagaaagg

SEQ ID NO: 129765 - DNA, 39 bp, Artificial Sequence
  primer
gtaaaacgacggccagttctagggctcagtttcctctgt

SEQ ID NO: 129766 - DNA, 23 bp, Artificial Sequence
  primer
aattgaggcagaggaggttacac

SEQ ID NO: 129767 - DNA, 22 bp, Artificial Sequence
  primer
tgtctcagtggtcttgaaggtc

SEQ ID NO: 129768 - DNA, 21 bp, Artificial Sequence
  primer
aatactgggcaacccaaacac

SEQ ID NO: 129769 - DNA, 26 bp, Artificial Sequence
  primer
gactaaattggcaataataggcagta

SEQ ID NO: 129770 - DNA, 21 bp, Artificial Sequence
  primer
ttgtgggcccatatgttacac

SEQ ID NO: 129771 - DNA, 21 bp, Artificial Sequence
  primer
tggaccatgctaagtgctgtg

SEQ ID NO: 129772 - DNA, 27 bp, Artificial Sequence
  primer
ataatttctgagacatcaatagccttt

SEQ ID NO: 129773 - DNA, 42 bp, Artificial Sequence
  primer
gtaaaacgacggccagtttccatgctcatctgaaacttagag

SEQ ID NO: 129774 - DNA, 21 bp, Artificial Sequence
  primer
aaacctcaccaatgctggttc

SEQ ID NO: 129775 - DNA, 39 bp, Artificial Sequence
  primer
gtaaaacgacggccagtgccctactcacaggaatcaaac

SEQ ID NO: 129776 - DNA, 38 bp, Artificial Sequence
  primer
gtaaaacgacggccagtattggttaccctctgctttgc

SEQ ID NO: 129777 - DNA, 38 bp, Artificial Sequence
  primer
gtaaaacgacggccagttataggtggaggaagggaggg

SEQ ID NO: 129778 - DNA, 21 bp, Artificial Sequence
  primer
ttcctcattgaaagcaaatgg

SEQ ID NO: 129779 - DNA, 38 bp, Artificial Sequence
  primer
gtaaaacgacggccagtcattggtaggctggtgttctg

SEQ ID NO: 129780 - DNA, 38 bp, Artificial Sequence
  primer
gtaaaacgacggccagtgaaagggaagctccacacaac

SEQ ID NO: 129781 - DNA, 21 bp, Artificial Sequence
  primer
attagtcaggcttggtggcag

SEQ ID NO: 129782 - DNA, 38 bp, Artificial Sequence
  primer
gtaaaacgacggccagtcccactgtgcctcaactatcc

SEQ ID NO: 129783 - DNA, 38 bp, Artificial Sequence
  primer
gtaaaacgacggccagtctggaggaacctgctatttgc

SEQ ID NO: 129784 - DNA, 19 bp, Artificial Sequence
  primer
gggccttcgattgaagttt

SEQ ID NO: 129785 - DNA, 39 bp, Artificial Sequence
  primer
gtaaaacgacggccagtccacatgaagctagatgttctg

SEQ ID NO: 129786 - DNA, 24 bp, Artificial Sequence
  primer
tgaaagacattacatgtgaggagg

SEQ ID NO: 129787 - DNA, 38 bp, Artificial Sequence
  primer
gtaaaacgacggccagtagtggcagaagtaaggccaac

SEQ ID NO: 129788 - DNA, 21 bp, Artificial Sequence
  primer
atggtcactgtagggagacgg

SEQ ID NO: 129789 - DNA, 38 bp, Artificial Sequence
  primer
gtaaaacgacggccagtccaaggttgacagggagattg

SEQ ID NO: 129790 - DNA, 38 bp, Artificial Sequence
  primer
gtaaaacgacggccagtaggtccttaggaatgccactg

SEQ ID NO: 129791 - DNA, 21 bp, Artificial Sequence
  primer
gctaagcagtagaagcccgtg

SEQ ID NO: 129792 - DNA, 38 bp, Artificial Sequence
  primer
gtaaaacgacggccagtgagcacagggtcttctcacag

SEQ ID NO: 129793 - DNA, 38 bp, Artificial Sequence
  primer
gtaaaacgacggccagtcagcttctcagcgtcattacc

SEQ ID NO: 129794 - DNA, 21 bp, Artificial Sequence
  primer
ttggactagagggtttccagg

SEQ ID NO: 129795 - DNA, 21 bp, Artificial Sequence
  primer
cttccttctccctaaccaccc

SEQ ID NO: 129796 - DNA, 21 bp, Artificial Sequence
  primer
tgggaaacagatgtagccagg

SEQ ID NO: 129797 - DNA, 38 bp, Artificial Sequence
  primer
gtaaaacgacggccagttatggtggcagttctgctttc

SEQ ID NO: 129798 - DNA, 38 bp, Artificial Sequence
  primer
gtaaaacgacggccagttcactggaagagccatgacag

SEQ ID NO: 129799 - DNA, 21 bp, Artificial Sequence
  primer
cactaggctgcatgtccactc

SEQ ID NO: 129800 - DNA, 21 bp, Artificial Sequence
  primer
gaacagactgctggtactggg

SEQ ID NO: 129801 - DNA, 38 bp, Artificial Sequence
  primer
gtaaaacgacggccagtcggtgtcagaactccattcag

SEQ ID NO: 129802 - DNA, 37 bp, Artificial Sequence
  primer
gtaaaacgacggccagtcagcttccatcaaccctttg

SEQ ID NO: 129803 - DNA, 38 bp, Artificial Sequence
  primer
gtaaaacgacggccagtccagtcctcttccagtgcttc

SEQ ID NO: 129804 - DNA, 20 bp, Artificial Sequence
  primer
gcttaccagacacactgccc

SEQ ID NO: 129805 - DNA, 37 bp, Artificial Sequence
  primer
gtaaaacgacggccagtgaagtcgtacttggaggccc

SEQ ID NO: 129806 - DNA, 21 bp, Artificial Sequence
  primer
ttcaggtactcgggagtgttg

SEQ ID NO: 129807 - DNA, 38 bp, Artificial Sequence
  primer
gtaaaacgacggccagttgtgtataaggtgtgagcggc

SEQ ID NO: 129808 - DNA, 22 bp, Artificial Sequence
  primer
gatatcaaacgaatggcctcag

SEQ ID NO: 129809 - DNA, 21 bp, Artificial Sequence
  primer
tcaagtcaagtttgggtggtg

SEQ ID NO: 129810 - DNA, 22 bp, Artificial Sequence
  primer
gaaagagaggctcctgatcaac

SEQ ID NO: 129811 - DNA, 37 bp, Artificial Sequence
  primer
gtaaaacgacggccagtgagcctgtcatgagacccag

SEQ ID NO: 129812 - DNA, 37 bp, Artificial Sequence
  primer
gtaaaacgacggccagtcggagaagtcaacaaggtcg

SEQ ID NO: 129813 - DNA, 19 bp, Artificial Sequence
  primer
ctgctgacccagacgacac

SEQ ID NO: 129814 - DNA, 20 bp, Artificial Sequence
  primer
agaaggtgcctgctttctgg

SEQ ID NO: 129815 - DNA, 37 bp, Artificial Sequence
  primer
gtaaaacgacggccagtcgaagatcaggcaaagaggg

SEQ ID NO: 129816 - DNA, 36 bp, Artificial Sequence
  primer
gtaaaacgacggccagtgggacttgagctcagacgg

SEQ ID NO: 129817 - DNA, 23 bp, Artificial Sequence
  primer
gcagtggctctgaaattatatcc

SEQ ID NO: 129818 - DNA, 20 bp, Artificial Sequence
  primer
agaggagctggcgttagagg

SEQ ID NO: 129819 - DNA, 38 bp, Artificial Sequence
  primer
gtaaaacgacggccagtaactgctgtaccagcctgagc

SEQ ID NO: 129820 - DNA, 36 bp, Artificial Sequence
  primer
gtaaaacgacggccagtcatccgcagtgaggaacag

SEQ ID NO: 129821 - DNA, 21 bp, Artificial Sequence
  primer
aactcgaccatttgcttgtcc

SEQ ID NO: 129822 - DNA, 21 bp, Artificial Sequence
  primer
tggaagccaacaaagagacag

SEQ ID NO: 129823 - DNA, 21 bp, Artificial Sequence
  primer
gatcccatattgcaacctgac

SEQ ID NO: 129824 - DNA, 38 bp, Artificial Sequence
  primer
gtaaaacgacggccagtataaatgacgaccacaagccc

SEQ ID NO: 129825 - DNA, 38 bp, Artificial Sequence
  primer
gtaaaacgacggccagtgctgtggatcttcatttccag

SEQ ID NO: 129826 - DNA, 42 bp, Artificial Sequence
  primer
gtaaaacgacggccagttctacaaagcagtatttcaagttcg

SEQ ID NO: 129827 - DNA, 38 bp, Artificial Sequence
  primer
gtaaaacgacggccagtaatttctgccaaatgacaggg

SEQ ID NO: 129828 - DNA, 38 bp, Artificial Sequence
  primer
gtaaaacgacggccagtaccaaggcataagagatgagc

SEQ ID NO: 129829 - DNA, 20 bp, Artificial Sequence
  primer
ggacgggaatcacactcaag

SEQ ID NO: 129830 - DNA, 39 bp, Artificial Sequence
  primer
gtaaaacgacggccagtaggaaccctttcatagcatcac

SEQ ID NO: 129831 - DNA, 22 bp, Artificial Sequence
  primer
tcaatgaagaggcttagggaca

SEQ ID NO: 129832 - DNA, 21 bp, Artificial Sequence
  primer
gcagaaccaaaggacaggaag

SEQ ID NO: 129833 - DNA, 39 bp, Artificial Sequence
  primer
gtaaaacgacggccagtgccttcaagctagtaaactgcc

SEQ ID NO: 129834 - DNA, 39 bp, Artificial Sequence
  primer
gtaaaacgacggccagttgtgctgattacctgaaccaac

SEQ ID NO: 129835 - DNA, 39 bp, Artificial Sequence
  primer
gtaaaacgacggccagtctggctagcagtctgagaaagg

SEQ ID NO: 129836 - DNA, 38 bp, Artificial Sequence
  primer
gtaaaacgacggccagttgtccttgcattaccaactca

SEQ ID NO: 129837 - DNA, 21 bp, Artificial Sequence
  primer
tgtccatgttcccacagtttc

SEQ ID NO: 129838 - DNA, 40 bp, Artificial Sequence
  primer
gtaaaacgacggccagtttgctattgtttgcatttaccac

SEQ ID NO: 129839 - DNA, 40 bp, Artificial Sequence
  primer
gtaaaacgacggccagtttgtcagatgaaatggacaaatc

SEQ ID NO: 129840 - DNA, 25 bp, Artificial Sequence
  primer
tcatatcaagcttgctgttaaagac

SEQ ID NO: 129841 - DNA, 22 bp, Artificial Sequence
  primer
ggtggagacaaagacattcacc

SEQ ID NO: 129842 - DNA, 38 bp, Artificial Sequence
  primer
gtaaaacgacggccagtaattagagccacacatgccag

SEQ ID NO: 129843 - DNA, 37 bp, Artificial Sequence
  primer
gtaaaacgacggccagtccaagaagctcaagaccagc

SEQ ID NO: 129844 - DNA, 45 bp, Artificial Sequence
  primer
gtaaaacgacggccagtaacctctatacctctcagaacaaatgat

SEQ ID NO: 129845 - DNA, 23 bp, Artificial Sequence
  primer
aaaggccagtttccatacatacc

SEQ ID NO: 129846 - DNA, 39 bp, Artificial Sequence
  primer
gtaaaacgacggccagttttaggccacaggtttctcaaa

SEQ ID NO: 129847 - DNA, 38 bp, Artificial Sequence
  primer
gtaaaacgacggccagtaaacagaattgggactctggg

SEQ ID NO: 129848 - DNA, 39 bp, Artificial Sequence
  primer
gtaaaacgacggccagtccaacaggtaggtgatactggg

SEQ ID NO: 129849 - DNA, 26 bp, Artificial Sequence
  primer
ccagaggttgagaacaagttgaatag

SEQ ID NO: 129850 - DNA, 21 bp, Artificial Sequence
  primer
cattcacatagcaagcaaggg

SEQ ID NO: 129851 - DNA, 37 bp, Artificial Sequence
  primer
gtaaaacgacggccagtagtccgaggctctgagaagg

SEQ ID NO: 129852 - DNA, 21 bp, Artificial Sequence
  primer
tttccctcgttgattagggtc

SEQ ID NO: 129853 - DNA, 21 bp, Artificial Sequence
  primer
atcccttccctctctctgagg

SEQ ID NO: 129854 - DNA, 21 bp, Artificial Sequence
  primer
ccaggatgataacaggaaggg

SEQ ID NO: 129855 - DNA, 21 bp, Artificial Sequence
  primer
aggccctatgacttggaacag

SEQ ID NO: 129856 - DNA, 38 bp, Artificial Sequence
  primer
gtaaaacgacggccagtatgctgcctaagtcagaaggg

SEQ ID NO: 129857 - DNA, 23 bp, Artificial Sequence
  primer
ttgggcctttaagagaggtagtg

SEQ ID NO: 129858 - DNA, 21 bp, Artificial Sequence
  primer
tccaggaaagactcaccactg

SEQ ID NO: 129859 - DNA, 21 bp, Artificial Sequence
  primer
gaaggtcaagcgaggtgaaag

SEQ ID NO: 129860 - DNA, 38 bp, Artificial Sequence
  primer
gtaaaacgacggccagtacacaagtcacccaactctgg

SEQ ID NO: 129861 - DNA, 21 bp, Artificial Sequence
  primer
tcacagtagagcacaggccac

SEQ ID NO: 129862 - DNA, 38 bp, Artificial Sequence
  primer
gtaaaacgacggccagtaagccaaacatttccaattcc

SEQ ID NO: 129863 - DNA, 37 bp, Artificial Sequence
  primer
gtaaaacgacggccagtgtcttgacccagatcccacc

SEQ ID NO: 129864 - DNA, 38 bp, Artificial Sequence
  primer
gtaaaacgacggccagtttgtgaatggaactctgctgg

SEQ ID NO: 129865 - DNA, 22 bp, Artificial Sequence
  primer
tttggctgccatatggtatttc

SEQ ID NO: 129866 - DNA, 38 bp, Artificial Sequence
  primer
gtaaaacgacggccagtagaaagacgaagaggcaggag

SEQ ID NO: 129867 - DNA, 39 bp, Artificial Sequence
  primer
gtaaaacgacggccagtagggtggaaagaataacaggaa

SEQ ID NO: 129868 - DNA, 22 bp, Artificial Sequence
  primer
ttgtatctcagtgttcccaccc

SEQ ID NO: 129869 - DNA, 26 bp, Artificial Sequence
  primer
tttcattaatctaagagaaaggctgc

SEQ ID NO: 129870 - DNA, 22 bp, Artificial Sequence
  primer
ttgatttgctacacgagctttc

SEQ ID NO: 129871 - DNA, 38 bp, Artificial Sequence
  primer
gtaaaacgacggccagtgcccttcgatcttccacctac

SEQ ID NO: 129872 - DNA, 28 bp, Artificial Sequence
  primer
gatttaagtcaaagctagtgagtaacca

SEQ ID NO: 129873 - DNA, 26 bp, Artificial Sequence
  primer
tgtttaagtataaggagaaacagcca

SEQ ID NO: 129874 - DNA, 21 bp, Artificial Sequence
  primer
aaaggaaatggacaaaggagg

SEQ ID NO: 129875 - DNA, 21 bp, Artificial Sequence
  primer
cccagtatccagttctccctg

SEQ ID NO: 129876 - DNA, 20 bp, Artificial Sequence
  primer
gacagcacagttcatgcagc

SEQ ID NO: 129877 - DNA, 19 bp, Artificial Sequence
  primer
caggtcctggcacaatgag

SEQ ID NO: 129878 - DNA, 40 bp, Artificial Sequence
  primer
gtaaaacgacggccagtgttctaggctataagggacccag

SEQ ID NO: 129879 - DNA, 38 bp, Artificial Sequence
  primer
gtaaaacgacggccagtatgctgggtacggtatttgtg

SEQ ID NO: 129880 - DNA, 38 bp, Artificial Sequence
  primer
gtaaaacgacggccagtatccgggtggttctacagatg

SEQ ID NO: 129881 - DNA, 21 bp, Artificial Sequence
  primer
agaatcaggcaagggatcaag

SEQ ID NO: 129882 - DNA, 23 bp, Artificial Sequence
  primer
cctgaaacagccatatcacacag

SEQ ID NO: 129883 - DNA, 21 bp, Artificial Sequence
  primer
agtctaggcacagttcgtccc

SEQ ID NO: 129884 - DNA, 38 bp, Artificial Sequence
  primer
gtaaaacgacggccagtaatgagctctgagatggctgg

SEQ ID NO: 129885 - DNA, 21 bp, Artificial Sequence
  primer
accatccaacctctcttccac

SEQ ID NO: 129886 - DNA, 21 bp, Artificial Sequence
  primer
tttctctacctggcacaaccc

SEQ ID NO: 129887 - DNA, 38 bp, Artificial Sequence
  primer
gtaaaacgacggccagtaactcctgaccactcccacac

SEQ ID NO: 129888 - DNA, 21 bp, Artificial Sequence
  primer
cagcaagcctgtgagtgaaag

SEQ ID NO: 129889 - DNA, 21 bp, Artificial Sequence
  primer
aggtattcaacactggcctgg

SEQ ID NO: 129890 - DNA, 38 bp, Artificial Sequence
  primer
gtaaaacgacggccagtaaccaggcactcttaacctgg

SEQ ID NO: 129891 - DNA, 41 bp, Artificial Sequence
  primer
gtaaaacgacggccagtacagaatccagtccagagttaggt

SEQ ID NO: 129892 - DNA, 38 bp, Artificial Sequence
  primer
gtaaaacgacggccagttctggtattggtggaaggagg

SEQ ID NO: 129893 - DNA, 39 bp, Artificial Sequence
  primer
gtaaaacgacggccagtcctcaagaatcgttcacaaacc

SEQ ID NO: 129894 - DNA, 38 bp, Artificial Sequence
  primer
gtaaaacgacggccagtgagctaggcagaggtaggctg

SEQ ID NO: 129895 - DNA, 36 bp, Artificial Sequence
  primer
gtaaaacgacggccagtgtcttgtggaaagccctgc

SEQ ID NO: 129896 - DNA, 21 bp, Artificial Sequence
  primer
aaggagaggaacagcaagcac

SEQ ID NO: 129897 - DNA, 21 bp, Artificial Sequence
  primer
tacatccagaagctgtgtccc

SEQ ID NO: 129898 - DNA, 38 bp, Artificial Sequence
  primer
gtaaaacgacggccagtaagcacatacagcagccagtg

SEQ ID NO: 129899 - DNA, 21 bp, Artificial Sequence
  primer
gagggctatcagcaactgacc

SEQ ID NO: 129900 - DNA, 21 bp, Artificial Sequence
  primer
gatgccactgcccacatatac

SEQ ID NO: 129901 - DNA, 21 bp, Artificial Sequence
  primer
caaactgttcaacggcatctg

SEQ ID NO: 129902 - DNA, 18 bp, Artificial Sequence
  primer
gacagcctggcactcacc

SEQ ID NO: 129903 - DNA, 37 bp, Artificial Sequence
  primer
gtaaaacgacggccagtagctcgtgcagtctggtgtc

SEQ ID NO: 129904 - DNA, 19 bp, Artificial Sequence
  primer
acacctccagccagtgtgg

SEQ ID NO: 129905 - DNA, 19 bp, Artificial Sequence
  primer
ggtcagcaccatccaacct

SEQ ID NO: 129906 - DNA, 21 bp, Artificial Sequence
  primer
atccattccctcagtgtctcc

SEQ ID NO: 129907 - DNA, 21 bp, Artificial Sequence
  primer
caaggctttgcaatttgtgag

SEQ ID NO: 129908 - DNA, 21 bp, Artificial Sequence
  primer
agatcagcgcctggaagtatg

SEQ ID NO: 129909 - DNA, 21 bp, Artificial Sequence
  primer
tccacaaaccactggtactcc

SEQ ID NO: 129910 - DNA, 38 bp, Artificial Sequence
  primer
gtaaaacgacggccagtaactgccacaccagtttaggg

SEQ ID NO: 129911 - DNA, 38 bp, Artificial Sequence
  primer
gtaaaacgacggccagtcacggagccagttaaaccatc

SEQ ID NO: 129912 - DNA, 38 bp, Artificial Sequence
  primer
gtaaaacgacggccagtcttaactgcagcatgggtctg

SEQ ID NO: 129913 - DNA, 20 bp, Artificial Sequence
  primer
gagacaggaagctggtgtgc

SEQ ID NO: 129914 - DNA, 37 bp, Artificial Sequence
  primer
gtaaaacgacggccagtcaggctcctccctgaatctc

SEQ ID NO: 129915 - DNA, 38 bp, Artificial Sequence
  primer
gtaaaacgacggccagtaagctcaccacggtcacatag

SEQ ID NO: 129916 - DNA, 21 bp, Artificial Sequence
  primer
accctgccttaccacagtctc

SEQ ID NO: 129917 - DNA, 37 bp, Artificial Sequence
  primer
gtaaaacgacggccagtgtcaggcactgtggtgaagg

SEQ ID NO: 129918 - DNA, 19 bp, Artificial Sequence
  primer
cctccggactcacaaggtc

SEQ ID NO: 129919 - DNA, 38 bp, Artificial Sequence
  primer
gtaaaacgacggccagttcctgttaggccagtctctgc

SEQ ID NO: 129920 - DNA, 35 bp, Artificial Sequence
  primer
gtaaaacgacggccagtatgccgggtccactatgc

SEQ ID NO: 129921 - DNA, 21 bp, Artificial Sequence
  primer
ctccatgtagaccagaagccc

SEQ ID NO: 129922 - DNA, 37 bp, Artificial Sequence
  primer
gtaaaacgacggccagtactcccgacctccaacaaac

SEQ ID NO: 129923 - DNA, 21 bp, Artificial Sequence
  primer
gacccaaacaccagaacttcc

SEQ ID NO: 129924 - DNA, 37 bp, Artificial Sequence
  primer
gtaaaacgacggccagtccagtcacagaggatgtccc

SEQ ID NO: 129925 - DNA, 21 bp, Artificial Sequence
  primer
ctgcagtgcgcagtgagtatc

SEQ ID NO: 129926 - DNA, 19 bp, Artificial Sequence
  primer
gcctgaggaccctacaccc

SEQ ID NO: 129927 - DNA, 21 bp, Artificial Sequence
  primer
aagactggtgagctgtcgtcc

SEQ ID NO: 129928 - DNA, 19 bp, Artificial Sequence
  primer
cttgcctctctccgaatgc

SEQ ID NO: 129929 - DNA, 36 bp, Artificial Sequence
  primer
gtaaaacgacggccagtacacggagggaagggtcag

SEQ ID NO: 129930 - DNA, 21 bp, Artificial Sequence
  primer
gaggctgtgctgacaggaatc

SEQ ID NO: 129931 - DNA, 18 bp, Artificial Sequence
  primer
cagcaggcagtaggcgtc

SEQ ID NO: 129932 - DNA, 38 bp, Artificial Sequence
  primer
gtaaaacgacggccagtatgcaggtccttggtttatgg

SEQ ID NO: 129933 - DNA, 38 bp, Artificial Sequence
  primer
gtaaaacgacggccagtgggaggagtttgatgctaggg

SEQ ID NO: 129934 - DNA, 36 bp, Artificial Sequence
  primer
gtaaaacgacggccagtgcaagctgaccctgaggtg

SEQ ID NO: 129935 - DNA, 38 bp, Artificial Sequence
  primer
gtaaaacgacggccagtccagacccaccactgtctagg

SEQ ID NO: 129936 - DNA, 20 bp, Artificial Sequence
  primer
atctgggtacctgaccctgg

SEQ ID NO: 129937 - DNA, 21 bp, Artificial Sequence
  primer
ttacaagtgtgctcctggtgg

SEQ ID NO: 129938 - DNA, 21 bp, Artificial Sequence
  primer
gggcgagggttactgtacttg

SEQ ID NO: 129939 - DNA, 18 bp, Artificial Sequence
  primer
gcccttcctgctattcgc

SEQ ID NO: 129940 - DNA, 18 bp, Artificial Sequence
  primer
atcccacatcggcctctc

SEQ ID NO: 129941 - DNA, 38 bp, Artificial Sequence
  primer
gtaaaacgacggccagttccatgccctgaaatacaacc

SEQ ID NO: 129942 - DNA, 21 bp, Artificial Sequence
  primer
ctaccgcagcactgtatttgc

SEQ ID NO: 129943 - DNA, 19 bp, Artificial Sequence
  primer
gtgtacccacagtgccagc

SEQ ID NO: 129944 - DNA, 21 bp, Artificial Sequence
  primer
caaggctgaatgagtgagtgg

SEQ ID NO: 129945 - DNA, 21 bp, Artificial Sequence
  primer
cagctcaatgggtgtttgttg

SEQ ID NO: 129946 - DNA, 39 bp, Artificial Sequence
  primer
gtaaaacgacggccagtgcactttcactgtggatagcag

SEQ ID NO: 129947 - DNA, 38 bp, Artificial Sequence
  primer
gtaaaacgacggccagtaggactcatcagctctcctgg

SEQ ID NO: 129948 - DNA, 20 bp, Artificial Sequence
  primer
acaacaaatgcaggtcaggg

SEQ ID NO: 129949 - DNA, 40 bp, Artificial Sequence
  primer
gtaaaacgacggccagtgatattaggtctttgggtggagc

SEQ ID NO: 129950 - DNA, 37 bp, Artificial Sequence
  primer
gtaaaacgacggccagtcgcgtggcttatgatctgtc

SEQ ID NO: 129951 - DNA, 23 bp, Artificial Sequence
  primer
tttatatgttcagagtggccagg

SEQ ID NO: 129952 - DNA, 41 bp, Artificial Sequence
  primer
gtaaaacgacggccagtggattctaaggttcattggatctg

SEQ ID NO: 129953 - DNA, 21 bp, Artificial Sequence
  primer
tcacttccatcaaacgtcctc

SEQ ID NO: 129954 - DNA, 21 bp, Artificial Sequence
  primer
gatggctggaaaggaaagaac

SEQ ID NO: 129955 - DNA, 38 bp, Artificial Sequence
  primer
gtaaaacgacggccagtctgcatatggctggctgttag

SEQ ID NO: 129956 - DNA, 20 bp, Artificial Sequence
  primer
ggaccacctcactccctcag

SEQ ID NO: 129957 - DNA, 21 bp, Artificial Sequence
  primer
atgtagttggcatttgggcag

SEQ ID NO: 129958 - DNA, 20 bp, Artificial Sequence
  primer
ttctctcaaatcaggcatgg

SEQ ID NO: 129959 - DNA, 43 bp, Artificial Sequence
  primer
gtaaaacgacggccagttctgtggatccaaatgagtaagtcta

SEQ ID NO: 129960 - DNA, 22 bp, Artificial Sequence
  primer
gcaaagcagtaagttctgtgga

SEQ ID NO: 129961 - DNA, 22 bp, Artificial Sequence
  primer
ccatttgcttccaccatttatc

SEQ ID NO: 129962 - DNA, 22 bp, Artificial Sequence
  primer
catttgaatgggacagatgact

SEQ ID NO: 129963 - DNA, 38 bp, Artificial Sequence
  primer
gtaaaacgacggccagtcaagggctaaatctgacagcc

SEQ ID NO: 129964 - DNA, 23 bp, Artificial Sequence
  primer
tttccttatttgtggtatgcagc

SEQ ID NO: 129965 - DNA, 38 bp, Artificial Sequence
  primer
gtaaaacgacggccagtgtctcctcctgtgaccaatgc

SEQ ID NO: 129966 - DNA, 44 bp, Artificial Sequence
  primer
gtaaaacgacggccagtttcaaattgcctaccatattgatttac

SEQ ID NO: 129967 - DNA, 23 bp, Artificial Sequence
  primer
ttagcttgtgaaatctcctgctc

SEQ ID NO: 129968 - DNA, 27 bp, Artificial Sequence
  primer
gagaaacagtactcttgagcatcagtc

SEQ ID NO: 129969 - DNA, 44 bp, Artificial Sequence
  primer
gtaaaacgacggccagttttaaacatcattaccaacacattaaa

SEQ ID NO: 129970 - DNA, 21 bp, Artificial Sequence
  primer
ggaagcgacctttatttcctg

SEQ ID NO: 129971 - DNA, 21 bp, Artificial Sequence
  primer
tcctgggagtctctctgaacc

SEQ ID NO: 129972 - DNA, 21 bp, Artificial Sequence
  primer
ggcaacgagagtgaaactcag

SEQ ID NO: 129973 - DNA, 38 bp, Artificial Sequence
  primer
gtaaaacgacggccagtgaagcaaggctaacgtccatc

SEQ ID NO: 129974 - DNA, 21 bp, Artificial Sequence
  primer
aaggtctaaagctgccctctg

SEQ ID NO: 129975 - DNA, 21 bp, Artificial Sequence
  primer
ctcttgactttgttgccctgg

SEQ ID NO: 129976 - DNA, 21 bp, Artificial Sequence
  primer
atggccctacaccttgacctc

SEQ ID NO: 129977 - DNA, 38 bp, Artificial Sequence
  primer
gtaaaacgacggccagttcatttgggaagtcttctggg

SEQ ID NO: 129978 - DNA, 21 bp, Artificial Sequence
  primer
ccctggctatctctgcttcag

SEQ ID NO: 129979 - DNA, 21 bp, Artificial Sequence
  primer
gtgcctgctcagagaaaccag

SEQ ID NO: 129980 - DNA, 18 bp, Artificial Sequence
  primer
agctcctctgggtgcgag

SEQ ID NO: 129981 - DNA, 24 bp, Artificial Sequence
  primer
aacaccttctggactgacactagc

SEQ ID NO: 129982 - DNA, 22 bp, Artificial Sequence
  primer
tccaagttcaggaaccaaagag

SEQ ID NO: 129983 - DNA, 38 bp, Artificial Sequence
  primer
gtaaaacgacggccagttaatgcttccaaagaggcgag

SEQ ID NO: 129984 - DNA, 38 bp, Artificial Sequence
  primer
gtaaaacgacggccagtgctcacatactctcagccacg

SEQ ID NO: 129985 - DNA, 38 bp, Artificial Sequence
  primer
gtaaaacgacggccagtgctcacactgaagcccttctc

SEQ ID NO: 129986 - DNA, 38 bp, Artificial Sequence
  primer
gtaaaacgacggccagtttactactgggagtgggatgg

SEQ ID NO: 129987 - DNA, 38 bp, Artificial Sequence
  primer
gtaaaacgacggccagttactctgcatctggaggaggg

SEQ ID NO: 129988 - DNA, 39 bp, Artificial Sequence
  primer
gtaaaacgacggccagtcaaattcctgaccttgtgatcc

SEQ ID NO: 129989 - DNA, 38 bp, Artificial Sequence
  primer
gtaaaacgacggccagtgagctccacatcataccaacc

SEQ ID NO: 129990 - DNA, 39 bp, Artificial Sequence
  primer
gtaaaacgacggccagttccaagatcataatgggtccac

SEQ ID NO: 129991 - DNA, 25 bp, Artificial Sequence
  primer
gaacactttaaacagcaatttagcc

SEQ ID NO: 129992 - DNA, 38 bp, Artificial Sequence
  primer
gtaaaacgacggccagtgagttgaaggctgcagtaagc

SEQ ID NO: 129993 - DNA, 22 bp, Artificial Sequence
  primer
aggaacacagccattctctctc

SEQ ID NO: 129994 - DNA, 46 bp, Artificial Sequence
  primer
gtaaaacgacggccagtacaaatagatttaactaaagtgacaagca

SEQ ID NO: 129995 - DNA, 21 bp, Artificial Sequence
  primer
ttctgaagacccatcctcctc

SEQ ID NO: 129996 - DNA, 38 bp, Artificial Sequence
  primer
gtaaaacgacggccagtcctggcaggtcctcagtagac

SEQ ID NO: 129997 - DNA, 21 bp, Artificial Sequence
  primer
gactgcttctgaggtggatgg

SEQ ID NO: 129998 - DNA, 38 bp, Artificial Sequence
  primer
gtaaaacgacggccagtaaatatcctccaggccaatcc

SEQ ID NO: 129999 - DNA, 37 bp, Artificial Sequence
  primer
gtaaaacgacggccagtactggctggcttagcaactg

SEQ ID NO: 130000 - DNA, 40 bp, Artificial Sequence
  primer
gtaaaacgacggccagtaagggatttatgtctctcctccc

SEQ ID NO: 130001 - DNA, 18 bp, Artificial Sequence
  primer
acggacacctgggagagg

SEQ ID NO: 130002 - DNA, 40 bp, Artificial Sequence
  primer
gtaaaacgacggccagtttaagggatgccataacaacaag

SEQ ID NO: 130003 - DNA, 22 bp, Artificial Sequence
  primer
tggaatcttcacatcattctgg

SEQ ID NO: 130004 - DNA, 22 bp, Artificial Sequence
  primer
aatcacatttgagcacgaacac

SEQ ID NO: 130005 - DNA, 21 bp, Artificial Sequence
  primer
gcagaggagctactttcctgg

SEQ ID NO: 130006 - DNA, 21 bp, Artificial Sequence
  primer
ctataggcacatgcaaccacg

SEQ ID NO: 130007 - DNA, 38 bp, Artificial Sequence
  primer
gtaaaacgacggccagtaccttgggtgaggctagtgaa

SEQ ID NO: 130008 - DNA, 20 bp, Artificial Sequence
  primer
gacctaagcgatctgcccac

SEQ ID NO: 130009 - DNA, 21 bp, Artificial Sequence
  primer
cctaagggacagcatccagtt

SEQ ID NO: 130010 - DNA, 41 bp, Artificial Sequence
  primer
gtaaaacgacggccagtactaaggtctagcgactgtgtcag

SEQ ID NO: 130011 - DNA, 21 bp, Artificial Sequence
  primer
tcatgtgtggatgtatgtcgc

SEQ ID NO: 130012 - DNA, 23 bp, Artificial Sequence
  primer
caccatttaggtgatttgactgc

SEQ ID NO: 130013 - DNA, 19 bp, Artificial Sequence
  primer
acctggctccacgagaaac

SEQ ID NO: 130014 - DNA, 37 bp, Artificial Sequence
  primer
gtaaaacgacggccagtccatccaagcacaaccactg

SEQ ID NO: 130015 - DNA, 38 bp, Artificial Sequence
  primer
gtaaaacgacggccagtgtgtgtgaccagtaaggcagg

SEQ ID NO: 130016 - DNA, 21 bp, Artificial Sequence
  primer
ccagaaactgtgtagaacggg

SEQ ID NO: 130017 - DNA, 38 bp, Artificial Sequence
  primer
gtaaaacgacggccagtgatcaaggatgccatgaggag

SEQ ID NO: 130018 - DNA, 21 bp, Artificial Sequence
  primer
cacaggacatgggagacactg

SEQ ID NO: 130019 - DNA, 21 bp, Artificial Sequence
  primer
tgagcaaatcttcttccctcc

SEQ ID NO: 130020 - DNA, 21 bp, Artificial Sequence
  primer
gaccacttgtcccattaagcc

SEQ ID NO: 130021 - DNA, 21 bp, Artificial Sequence
  primer
aacctacaggacacacagggc

SEQ ID NO: 130022 - DNA, 38 bp, Artificial Sequence
  primer
gtaaaacgacggccagtagagctcagagacagcatggg

SEQ ID NO: 130023 - DNA, 21 bp, Artificial Sequence
  primer
ttgacctccagctacagaggc

SEQ ID NO: 130024 - DNA, 20 bp, Artificial Sequence
  primer
aagagagagcctcagcccag

SEQ ID NO: 130025 - DNA, 36 bp, Artificial Sequence
  primer
gtaaaacgacggccagtagaccgtcctggcactcac

SEQ ID NO: 130026 - DNA, 20 bp, Artificial Sequence
  primer
cttgctctgaggacaccagc

SEQ ID NO: 130027 - DNA, 21 bp, Artificial Sequence
  primer
acggactccacagtcacagag

SEQ ID NO: 130028 - DNA, 36 bp, Artificial Sequence
  primer
gtaaaacgacggccagtaaagcattgtgggtggtgc

SEQ ID NO: 130029 - DNA, 21 bp, Artificial Sequence
  primer
aataaaggcaagacagcctgg

SEQ ID NO: 130030 - DNA, 37 bp, Artificial Sequence
  primer
gtaaaacgacggccagtaagggtagccgagccttagc

SEQ ID NO: 130031 - DNA, 38 bp, Artificial Sequence
  primer
gtaaaacgacggccagtcatggcctgtgtttctctctg

SEQ ID NO: 130032 - DNA, 38 bp, Artificial Sequence
  primer
gtaaaacgacggccagtcccaccacttctgactctcac

SEQ ID NO: 130033 - DNA, 38 bp, Artificial Sequence
  primer
gtaaaacgacggccagtatcaggagttgacatcggtgg

SEQ ID NO: 130034 - DNA, 38 bp, Artificial Sequence
  primer
gtaaaacgacggccagtatatccacctttgcatcccag

SEQ ID NO: 130035 - DNA, 26 bp, Artificial Sequence
  primer
tgagtgaagggtaagaactactgctc

SEQ ID NO: 130036 - DNA, 21 bp, Artificial Sequence
  primer
agtaagaagcagcagcccttg

SEQ ID NO: 130037 - DNA, 38 bp, Artificial Sequence
  primer
gtaaaacgacggccagtaattctctgcaccagaggacc

SEQ ID NO: 130038 - DNA, 21 bp, Artificial Sequence
  primer
aatctccaaatgcatcagtgg

SEQ ID NO: 130039 - DNA, 37 bp, Artificial Sequence
  primer
gtaaaacgacggccagtagcctgggcaagatggtaag

SEQ ID NO: 130040 - DNA, 38 bp, Artificial Sequence
  primer
gtaaaacgacggccagttttatgctgggactctttggg

SEQ ID NO: 130041 - DNA, 38 bp, Artificial Sequence
  primer
gtaaaacgacggccagtccagtgctctctggactgaag

SEQ ID NO: 130042 - DNA, 21 bp, Artificial Sequence
  primer
tgatcattgaaggctttgtgc

SEQ ID NO: 130043 - DNA, 40 bp, Artificial Sequence
  primer
gtaaaacgacggccagtggaaccagtgcaaatatagtccc

SEQ ID NO: 130044 - DNA, 38 bp, Artificial Sequence
  primer
gtaaaacgacggccagtataccttatcccacgattgcc

SEQ ID NO: 130045 - DNA, 38 bp, Artificial Sequence
  primer
gtaaaacgacggccagtcaaggaacagggccatctaag

SEQ ID NO: 130046 - DNA, 20 bp, Artificial Sequence
  primer
actccttctgcctcctgctc

SEQ ID NO: 130047 - DNA, 20 bp, Artificial Sequence
  primer
cgaacacttaatgtgcctgg

SEQ ID NO: 130048 - DNA, 21 bp, Artificial Sequence
  primer
tgcctcatacctcaaagatgc

SEQ ID NO: 130049 - DNA, 38 bp, Artificial Sequence
  primer
gtaaaacgacggccagtcatcttaggcctgactccacc

SEQ ID NO: 130050 - DNA, 21 bp, Artificial Sequence
  primer
gagtgaatgtcctatggcagg

SEQ ID NO: 130051 - DNA, 21 bp, Artificial Sequence
  primer
tagcacagttctggctgtcac

SEQ ID NO: 130052 - DNA, 21 bp, Artificial Sequence
  primer
tttccattgatgagccttgtc

SEQ ID NO: 130053 - DNA, 21 bp, Artificial Sequence
  primer
gacaagggtcaaaggaacgag

SEQ ID NO: 130054 - DNA, 38 bp, Artificial Sequence
  primer
gtaaaacgacggccagtacatgcttggagccttgagtc

SEQ ID NO: 130055 - DNA, 37 bp, Artificial Sequence
  primer
gtaaaacgacggccagtaccctgtggacactgcaaag

SEQ ID NO: 130056 - DNA, 21 bp, Artificial Sequence
  primer
ggagtgctcctctctgattcg

SEQ ID NO: 130057 - DNA, 20 bp, Artificial Sequence
  primer
acctccgttcctgacacctt

SEQ ID NO: 130058 - DNA, 21 bp, Artificial Sequence
  primer
agattatggaaggccagggag

SEQ ID NO: 130059 - DNA, 22 bp, Artificial Sequence
  primer
aaagagagttggaatgagaggg

SEQ ID NO: 130060 - DNA, 21 bp, Artificial Sequence
  primer
gaagcttcagggaggtgacag

SEQ ID NO: 130061 - DNA, 21 bp, Artificial Sequence
  primer
catcacagaggtgcatacgtg

SEQ ID NO: 130062 - DNA, 38 bp, Artificial Sequence
  primer
gtaaaacgacggccagtgcaacctacctcatgcagtca

SEQ ID NO: 130063 - DNA, 21 bp, Artificial Sequence
  primer
gggcactttccacttcaacag

SEQ ID NO: 130064 - DNA, 21 bp, Artificial Sequence
  primer
ctgatggtggcatttcaactt

SEQ ID NO: 130065 - DNA, 21 bp, Artificial Sequence
  primer
gccagggttacaagtttctcc

SEQ ID NO: 130066 - DNA, 38 bp, Artificial Sequence
  primer
gtaaaacgacggccagttctatgtgatcagggccaatg

SEQ ID NO: 130067 - DNA, 24 bp, Artificial Sequence
  primer
gcagactatgagttagttgatgcc

SEQ ID NO: 130068 - DNA, 24 bp, Artificial Sequence
  primer
tcttctgaatgtgtaagttggtgg

SEQ ID NO: 130069 - DNA, 39 bp, Artificial Sequence
  primer
gtaaaacgacggccagtaccaccctgatttgcatttaac

SEQ ID NO: 130070 - DNA, 41 bp, Artificial Sequence
  primer
gtaaaacgacggccagttgtgttcattgagaatctgctctg

SEQ ID NO: 130071 - DNA, 23 bp, Artificial Sequence
  primer
gagctctgctcaccagaaataag

SEQ ID NO: 130072 - DNA, 21 bp, Artificial Sequence
  primer
atgttccatgtttgccaagag

SEQ ID NO: 130073 - DNA, 22 bp, Artificial Sequence
  primer
cctgtgactctgccttaactcc

SEQ ID NO: 130074 - DNA, 21 bp, Artificial Sequence
  primer
taaggcaaccactttcccttg

SEQ ID NO: 130075 - DNA, 39 bp, Artificial Sequence
  primer
gtaaaacgacggccagtttcagtttaatgcaggcctttc

SEQ ID NO: 130076 - DNA, 21 bp, Artificial Sequence
  primer
tacggccctttagagatgtgg

SEQ ID NO: 130077 - DNA, 37 bp, Artificial Sequence
  primer
gtaaaacgacggccagtactccagtctcaggcccatc

SEQ ID NO: 130078 - DNA, 20 bp, Artificial Sequence
  primer
cagagtgaggactcgggatg

SEQ ID NO: 130079 - DNA, 37 bp, Artificial Sequence
  primer
gtaaaacgacggccagtcactcagcctgtgtctgtgg

SEQ ID NO: 130080 - DNA, 38 bp, Artificial Sequence
  primer
gtaaaacgacggccagtcttgatggagaacggtctgtc

SEQ ID NO: 130081 - DNA, 21 bp, Artificial Sequence
  primer
caacactttgtgctggttccc

SEQ ID NO: 130082 - DNA, 21 bp, Artificial Sequence
  primer
tcttggcacataagcagcaac

SEQ ID NO: 130083 - DNA, 38 bp, Artificial Sequence
  primer
gtaaaacgacggccagttgggcccttgagtttatatcg

SEQ ID NO: 130084 - DNA, 38 bp, Artificial Sequence
  primer
gtaaaacgacggccagttcacctgagagtccatagccc

SEQ ID NO: 130085 - DNA, 38 bp, Artificial Sequence
  primer
gtaaaacgacggccagtggccagacactacaacttccc

SEQ ID NO: 130086 - DNA, 38 bp, Artificial Sequence
  primer
gtaaaacgacggccagtaaaccaaaggaattggtgagg

SEQ ID NO: 130087 - DNA, 23 bp, Artificial Sequence
  primer
tggcaaacctctatagtccttcc

SEQ ID NO: 130088 - DNA, 21 bp, Artificial Sequence
  primer
gcaagacagaatgcaaggagg

SEQ ID NO: 130089 - DNA, 21 bp, Artificial Sequence
  primer
ttatcaactgggaaggaagcc

SEQ ID NO: 130090 - DNA, 21 bp, Artificial Sequence
  primer
tgagtgaatgactggaccctg

SEQ ID NO: 130091 - DNA, 21 bp, Artificial Sequence
  primer
gactccagtgtctgggtccac

SEQ ID NO: 130092 - DNA, 22 bp, Artificial Sequence
  primer
tccctaaagcagacatagcacc

SEQ ID NO: 130093 - DNA, 38 bp, Artificial Sequence
  primer
gtaaaacgacggccagttggcttcaagacagcgtattc

SEQ ID NO: 130094 - DNA, 39 bp, Artificial Sequence
  primer
gtaaaacgacggccagtcagagcagcagttccaaagtag

SEQ ID NO: 130095 - DNA, 21 bp, Artificial Sequence
  primer
taaagggctgtgctgaatctg

SEQ ID NO: 130096 - DNA, 19 bp, Artificial Sequence
  primer
ccacctcgaggaagcactc

SEQ ID NO: 130097 - DNA, 38 bp, Artificial Sequence
  primer
gtaaaacgacggccagttctctgcagacagaagggacc

SEQ ID NO: 130098 - DNA, 21 bp, Artificial Sequence
  primer
agaaggagatgtggttgggtg

SEQ ID NO: 130099 - DNA, 38 bp, Artificial Sequence
  primer
gtaaaacgacggccagtaggtaatgccagaggtggatg

SEQ ID NO: 130100 - DNA, 37 bp, Artificial Sequence
  primer
gtaaaacgacggccagtgaagcctgggttctaggtgg

SEQ ID NO: 130101 - DNA, 20 bp, Artificial Sequence
  primer
accatgaggactccctgacc

SEQ ID NO: 130102 - DNA, 21 bp, Artificial Sequence
  primer
ctggtcagtctgattccaccc

SEQ ID NO: 130103 - DNA, 37 bp, Artificial Sequence
  primer
gtaaaacgacggccagtgtcctccgcaggtttctttc

SEQ ID NO: 130104 - DNA, 38 bp, Artificial Sequence
  primer
gtaaaacgacggccagtcagtttccctcctgcctactg

SEQ ID NO: 130105 - DNA, 21 bp, Artificial Sequence
  primer
ctgaagcacccaagtgatctg

SEQ ID NO: 130106 - DNA, 38 bp, Artificial Sequence
  primer
gtaaaacgacggccagtaggctccctaactccaccttc

SEQ ID NO: 130107 - DNA, 22 bp, Artificial Sequence
  primer
gggtactgtataagccgcagtg

SEQ ID NO: 130108 - DNA, 20 bp, Artificial Sequence
  primer
aggacatgggctgtgatctg

SEQ ID NO: 130109 - DNA, 20 bp, Artificial Sequence
  primer
tgacacacctctcctgggac

SEQ ID NO: 130110 - DNA, 38 bp, Artificial Sequence
  primer
gtaaaacgacggccagtagccactagtcaaggagcctg

SEQ ID NO: 130111 - DNA, 21 bp, Artificial Sequence
  primer
agagctgggtagggctggtag

SEQ ID NO: 130112 - DNA, 21 bp, Artificial Sequence
  primer
tggaccctcactctcatttcc

SEQ ID NO: 130113 - DNA, 21 bp, Artificial Sequence
  primer
actcctcacacgggtaactcc

SEQ ID NO: 130114 - DNA, 19 bp, Artificial Sequence
  primer
gactgtgctgtctggctgc

SEQ ID NO: 130115 - DNA, 37 bp, Artificial Sequence
  primer
gtaaaacgacggccagtagagtcttctgctggtgccc

SEQ ID NO: 130116 - DNA, 21 bp, Artificial Sequence
  primer
agacatccagtcccaatgtcc

SEQ ID NO: 130117 - DNA, 38 bp, Artificial Sequence
  primer
gtaaaacgacggccagtgaactcctcagtatctggccg

SEQ ID NO: 130118 - DNA, 21 bp, Artificial Sequence
  primer
gtactgcatctgtctttgccc

SEQ ID NO: 130119 - DNA, 38 bp, Artificial Sequence
  primer
gtaaaacgacggccagtaagcagcattagagagcatgg

SEQ ID NO: 130120 - DNA, 38 bp, Artificial Sequence
  primer
gtaaaacgacggccagtcaaacgaaggaagacctttgc

SEQ ID NO: 130121 - DNA, 20 bp, Artificial Sequence
  primer
ccaacctgggtgacagagtt

SEQ ID NO: 130122 - DNA, 38 bp, Artificial Sequence
  primer
gtaaaacgacggccagtttcacaaaccaagctccttgt

SEQ ID NO: 130123 - DNA, 38 bp, Artificial Sequence
  primer
gtaaaacgacggccagtttgtggtttgaccttcctcaa

SEQ ID NO: 130124 - DNA, 40 bp, Artificial Sequence
  primer
gtaaaacgacggccagtcccaactaaaccaatttggaatc

SEQ ID NO: 130125 - DNA, 21 bp, Artificial Sequence
  primer
aagaaatcaggcatttgggac

SEQ ID NO: 130126 - DNA, 20 bp, Artificial Sequence
  primer
tcaatgcctgttaccttggc

SEQ ID NO: 130127 - DNA, 25 bp, Artificial Sequence
  primer
tcctttaccaaacttgaacgatatg

SEQ ID NO: 130128 - DNA, 20 bp, Artificial Sequence
  primer
accgtttggtctgatgcttg

SEQ ID NO: 130129 - DNA, 47 bp, Artificial Sequence
  primer
gtaaaacgacggccagtttctgacttaagtagcaataataaaccatt

SEQ ID NO: 130130 - DNA, 25 bp, Artificial Sequence
  primer
aaacaacactgaaaccaaagacatc

SEQ ID NO: 130131 - DNA, 39 bp, Artificial Sequence
  primer
gtaaaacgacggccagtggtccagtggattaagcaaacc

SEQ ID NO: 130132 - DNA, 41 bp, Artificial Sequence
  primer
gtaaaacgacggccagttcaaactgtgtcctattcctatcg

SEQ ID NO: 130133 - DNA, 27 bp, Artificial Sequence
  primer
tcatcataatttacaccttgatctctt

SEQ ID NO: 130134 - DNA, 21 bp, Artificial Sequence
  primer
gccttagtgcattctgggaac

SEQ ID NO: 130135 - DNA, 21 bp, Artificial Sequence
  primer
atgatctctgtgggtgtctgc

SEQ ID NO: 130136 - DNA, 20 bp, Artificial Sequence
  primer
agatctccaggagctgaggg

SEQ ID NO: 130137 - DNA, 38 bp, Artificial Sequence
  primer
gtaaaacgacggccagtttgtatttgtcctcaaggccc

SEQ ID NO: 130138 - DNA, 38 bp, Artificial Sequence
  primer
gtaaaacgacggccagtgtagcacagactccagggcac

SEQ ID NO: 130139 - DNA, 21 bp, Artificial Sequence
  primer
tcaggagttctctctcctccc

SEQ ID NO: 130140 - DNA, 21 bp, Artificial Sequence
  primer
gcaactgacaagtccagcaac

SEQ ID NO: 130141 - DNA, 21 bp, Artificial Sequence
  primer
aggatccaggacccagaagtc

SEQ ID NO: 130142 - DNA, 37 bp, Artificial Sequence
  primer
gtaaaacgacggccagtacagcccaatgtccctcttc

SEQ ID NO: 130143 - DNA, 18 bp, Artificial Sequence
  primer
ttctccatgttggtcggg

SEQ ID NO: 130144 - DNA, 21 bp, Artificial Sequence
  primer
ctgggaaacagagcaagtgag

SEQ ID NO: 130145 - DNA, 21 bp, Artificial Sequence
  primer
agctcaagtccaggctctacc

SEQ ID NO: 130146 - DNA, 27 bp, Artificial Sequence
  primer
ccagatggcagtaattcagtaaataaa

SEQ ID NO: 130147 - DNA, 38 bp, Artificial Sequence
  primer
gtaaaacgacggccagtaatttgtgaggatgagccacc

SEQ ID NO: 130148 - DNA, 38 bp, Artificial Sequence
  primer
gtaaaacgacggccagtttgatagacgcatacaagccc

SEQ ID NO: 130149 - DNA, 37 bp, Artificial Sequence
  primer
gtaaaacgacggccagtaattgggtctctcgctgtcc

SEQ ID NO: 130150 - DNA, 21 bp, Artificial Sequence
  primer
agaatgatttccaggccatcc

SEQ ID NO: 130151 - DNA, 38 bp, Artificial Sequence
  primer
gtaaaacgacggccagtgcacaaacgtgcagttcataa

SEQ ID NO: 130152 - DNA, 21 bp, Artificial Sequence
  primer
gaaggaattcagtccaccctg

SEQ ID NO: 130153 - DNA, 37 bp, Artificial Sequence
  primer
gtaaaacgacggccagtctgtcctcatgctgatgctg

SEQ ID NO: 130154 - DNA, 38 bp, Artificial Sequence
  primer
gtaaaacgacggccagtgcaaagaagcccagagaacag

SEQ ID NO: 130155 - DNA, 38 bp, Artificial Sequence
  primer
gtaaaacgacggccagtatccctaggccagtgtctagc

SEQ ID NO: 130156 - DNA, 21 bp, Artificial Sequence
  primer
ctgggcttaagtgatcttccc

SEQ ID NO: 130157 - DNA, 38 bp, Artificial Sequence
  primer
gtaaaacgacggccagttttgctgagacccaaacattg

SEQ ID NO: 130158 - DNA, 38 bp, Artificial Sequence
  primer
gtaaaacgacggccagtcaacagtgtgttcttgccagc

SEQ ID NO: 130159 - DNA, 21 bp, Artificial Sequence
  primer
tcctccttgaggaccatgttg

SEQ ID NO: 130160 - DNA, 21 bp, Artificial Sequence
  primer
ctgacaggcgtcccttatttc

SEQ ID NO: 130161 - DNA, 19 bp, Artificial Sequence
  primer
gacgagaatggcgtgaacc

SEQ ID NO: 130162 - DNA, 21 bp, Artificial Sequence
  primer
ttctctccctctgtgcaaatg

SEQ ID NO: 130163 - DNA, 21 bp, Artificial Sequence
  primer
agggcatcaggaaagggatac

SEQ ID NO: 130164 - DNA, 21 bp, Artificial Sequence
  primer
taggacagggccaagagagtc

SEQ ID NO: 130165 - DNA, 21 bp, Artificial Sequence
  primer
gaggaagtgagaccagggatg

SEQ ID NO: 130166 - DNA, 38 bp, Artificial Sequence
  primer
gtaaaacgacggccagtcataaagccttggcctgactc

SEQ ID NO: 130167 - DNA, 36 bp, Artificial Sequence
  primer
gtaaaacgacggccagtgatttccaggcctccacag

SEQ ID NO: 130168 - DNA, 21 bp, Artificial Sequence
  primer
gctgggacaatcctgatgaac

SEQ ID NO: 130169 - DNA, 20 bp, Artificial Sequence
  primer
ctaggccacagcaccctctc

SEQ ID NO: 130170 - DNA, 20 bp, Artificial Sequence
  primer
gcaggcactgaacaggtctc

SEQ ID NO: 130171 - DNA, 21 bp, Artificial Sequence
  primer
tcgcagtatgtgaaagttggg

SEQ ID NO: 130172 - DNA, 22 bp, Artificial Sequence
  primer
aacataggtctcaagcccacac

SEQ ID NO: 130173 - DNA, 38 bp, Artificial Sequence
  primer
gtaaaacgacggccagtttgctgaagcgtctcaagttc

SEQ ID NO: 130174 - DNA, 21 bp, Artificial Sequence
  primer
tcagccaatagtttggcagtc

SEQ ID NO: 130175 - DNA, 38 bp, Artificial Sequence
  primer
gtaaaacgacggccagtcagagatactccgacgcaagc

SEQ ID NO: 130176 - DNA, 36 bp, Artificial Sequence
  primer
gtaaaacgacggccagtcccagagttgcctctccac

SEQ ID NO: 130177 - DNA, 21 bp, Artificial Sequence
  primer
tcccatatcacagggtcacag

SEQ ID NO: 130178 - DNA, 21 bp, Artificial Sequence
  primer
tccattggtgtcttcaccttg

SEQ ID NO: 130179 - DNA, 38 bp, Artificial Sequence
  primer
gtaaaacgacggccagttagcaatgtgctctgacccac

SEQ ID NO: 130180 - DNA, 21 bp, Artificial Sequence
  primer
gcaagtcactgtgtagctggg

SEQ ID NO: 130181 - DNA, 38 bp, Artificial Sequence
  primer
gtaaaacgacggccagttgcacccttccttaacctcag

SEQ ID NO: 130182 - DNA, 22 bp, Artificial Sequence
  primer
gcaattgcttctgattcttccc

SEQ ID NO: 130183 - DNA, 21 bp, Artificial Sequence
  primer
atgcagacaatggaaaggttc

SEQ ID NO: 130184 - DNA, 38 bp, Artificial Sequence
  primer
gtaaaacgacggccagtagcttcgtccctatctttccc

SEQ ID NO: 130185 - DNA, 18 bp, Artificial Sequence
  primer
gctgcagtctccctgacg

SEQ ID NO: 130186 - DNA, 18 bp, Artificial Sequence
  primer
gctgcagtctccctgacg

SEQ ID NO: 130187 - DNA, 38 bp, Artificial Sequence
  primer
gtaaaacgacggccagtaaatctctgcaaacgggagac

SEQ ID NO: 130188 - DNA, 20 bp, Artificial Sequence
  primer
agcagattggtgtttccagg

SEQ ID NO: 130189 - DNA, 21 bp, Artificial Sequence
  primer
tcccagattaacaggcctacc

SEQ ID NO: 130190 - DNA, 37 bp, Artificial Sequence
  primer
gtaaaacgacggccagtaataaacacgccaaagctgc

SEQ ID NO: 130191 - DNA, 41 bp, Artificial Sequence
  primer
gtaaaacgacggccagttgcttgaagtaagggtctcttctc

SEQ ID NO: 130192 - DNA, 21 bp, Artificial Sequence
  primer
aaagccaaggataactgctgg

SEQ ID NO: 130193 - DNA, 38 bp, Artificial Sequence
  primer
gtaaaacgacggccagttcttcccattcgtcatcagag

SEQ ID NO: 130194 - DNA, 21 bp, Artificial Sequence
  primer
caacctggaagtgtgagcttg

SEQ ID NO: 130195 - DNA, 21 bp, Artificial Sequence
  primer
tgtattctagggcatgtgggc

SEQ ID NO: 130196 - DNA, 21 bp, Artificial Sequence
  primer
ggtttctgcacattggatgac

SEQ ID NO: 130197 - DNA, 38 bp, Artificial Sequence
  primer
gtaaaacgacggccagttgtgttgctgatggtagggag

SEQ ID NO: 130198 - DNA, 27 bp, Artificial Sequence
  primer
ttgatatgacttcttctcttcaagtcc

SEQ ID NO: 130199 - DNA, 21 bp, Artificial Sequence
  primer
cagcggtaactacacacaccc

SEQ ID NO: 130200 - DNA, 37 bp, Artificial Sequence
  primer
gtaaaacgacggccagtatgcttatgcatgcggtttc

SEQ ID NO: 130201 - DNA, 38 bp, Artificial Sequence
  primer
gtaaaacgacggccagttttacctctggttcacccacc

SEQ ID NO: 130202 - DNA, 21 bp, Artificial Sequence
  primer
cagaaacccaaacttgtgctc

SEQ ID NO: 130203 - DNA, 21 bp, Artificial Sequence
  primer
ggaagcctcaatttgctatgc

SEQ ID NO: 130204 - DNA, 21 bp, Artificial Sequence
  primer
gctgttcttgccacatcttcc

SEQ ID NO: 130205 - DNA, 21 bp, Artificial Sequence
  primer
tgtttgggtcacagccatatc

SEQ ID NO: 130206 - DNA, 40 bp, Artificial Sequence
  primer
gtaaaacgacggccagtcaatgctctatagcaaccaaacc

SEQ ID NO: 130207 - DNA, 42 bp, Artificial Sequence
  primer
gtaaaacgacggccagttgatgtgcatagctgtagttcattt

SEQ ID NO: 130208 - DNA, 44 bp, Artificial Sequence
  primer
gtaaaacgacggccagtttctacagacagaccttcagtaaacac

SEQ ID NO: 130209 - DNA, 24 bp, Artificial Sequence
  primer
aaagctcagtgaagtaaaccacaa

SEQ ID NO: 130210 - DNA, 38 bp, Artificial Sequence
  primer
gtaaaacgacggccagtagcagcattgcatttacctgg

SEQ ID NO: 130211 - DNA, 36 bp, Artificial Sequence
  primer
gtaaaacgacggccagtcaacagcccatcaatgcag

SEQ ID NO: 130212 - DNA, 21 bp, Artificial Sequence
  primer
tcatcgtgcctacttccacag

SEQ ID NO: 130213 - DNA, 22 bp, Artificial Sequence
  primer
accatttgctgaatgaacactg

SEQ ID NO: 130214 - DNA, 37 bp, Artificial Sequence
  primer
gtaaaacgacggccagtcccgctcagctactctcttc

SEQ ID NO: 130215 - DNA, 20 bp, Artificial Sequence
  primer
tcctgaccttgtgatccacc

SEQ ID NO: 130216 - DNA, 39 bp, Artificial Sequence
  primer
gtaaaacgacggccagttcagcatttgtaaacctttccc

SEQ ID NO: 130217 - DNA, 40 bp, Artificial Sequence
  primer
gtaaaacgacggccagtaaatattagccatgaaagcctgg

SEQ ID NO: 130218 - DNA, 22 bp, Artificial Sequence
  primer
aaatataaagcacgcagccatc

SEQ ID NO: 130219 - DNA, 23 bp, Artificial Sequence
  primer
ggctatcgtaccacacatctcag

SEQ ID NO: 130220 - DNA, 21 bp, Artificial Sequence
  primer
acatcttcacagggtgatggg

SEQ ID NO: 130221 - DNA, 39 bp, Artificial Sequence
  primer
gtaaaacgacggccagtcccacaacaaattacctgaccc

SEQ ID NO: 130222 - DNA, 21 bp, Artificial Sequence
  primer
gtgtaggccaatgactgaggc

SEQ ID NO: 130223 - DNA, 19 bp, Artificial Sequence
  primer
tggccagcccatgtatttc

SEQ ID NO: 130224 - DNA, 39 bp, Artificial Sequence
  primer
gtaaaacgacggccagtaagatgataaaggcactcccac

SEQ ID NO: 130225 - DNA, 37 bp, Artificial Sequence
  primer
gtaaaacgacggccagtccacaactttctgctcaggc

SEQ ID NO: 130226 - DNA, 21 bp, Artificial Sequence
  primer
agggatcacaaggcctctaac

SEQ ID NO: 130227 - DNA, 36 bp, Artificial Sequence
  primer
gtaaaacgacggccagtaccagggagaaccctccag

SEQ ID NO: 130228 - DNA, 20 bp, Artificial Sequence
  primer
aagggacatcaacagcctcc

SEQ ID NO: 130229 - DNA, 21 bp, Artificial Sequence
  primer
gtatcattgtttgggagtggg

SEQ ID NO: 130230 - DNA, 21 bp, Artificial Sequence
  primer
caacatgagcacatgaccttg

SEQ ID NO: 130231 - DNA, 38 bp, Artificial Sequence
  primer
gtaaaacgacggccagttcactcaaatatgggtttggg

SEQ ID NO: 130232 - DNA, 37 bp, Artificial Sequence
  primer
gtaaaacgacggccagtagaacctctaccagcgtggg

SEQ ID NO: 130233 - DNA, 38 bp, Artificial Sequence
  primer
gtaaaacgacggccagtcaggatgccctggatagtagg

SEQ ID NO: 130234 - DNA, 25 bp, Artificial Sequence
  primer
aaatctataggctttcctgacttgc

SEQ ID NO: 130235 - DNA, 21 bp, Artificial Sequence
  primer
gacaagagccatggacctcac

SEQ ID NO: 130236 - DNA, 21 bp, Artificial Sequence
  primer
tggcttggaaacagtcttcac

SEQ ID NO: 130237 - DNA, 38 bp, Artificial Sequence
  primer
gtaaaacgacggccagtcggataccattatccacatgc

SEQ ID NO: 130238 - DNA, 38 bp, Artificial Sequence
  primer
gtaaaacgacggccagtccttcttcagagctgggaatc

SEQ ID NO: 130239 - DNA, 21 bp, Artificial Sequence
  primer
ctagccaactgaaggacaggg

SEQ ID NO: 130240 - DNA, 38 bp, Artificial Sequence
  primer
gtaaaacgacggccagtaagggatgacaacctggactg

SEQ ID NO: 130241 - DNA, 22 bp, Artificial Sequence
  primer
ggactggtaggtaggaaggacg

SEQ ID NO: 130242 - DNA, 19 bp, Artificial Sequence
  primer
gcgaagtcgtagtcagggc

SEQ ID NO: 130243 - DNA, 38 bp, Artificial Sequence
  primer
gtaaaacgacggccagtgtatgggatactgggaccacc

SEQ ID NO: 130244 - DNA, 38 bp, Artificial Sequence
  primer
gtaaaacgacggccagtcaccaggtgagaacaccattg

SEQ ID NO: 130245 - DNA, 21 bp, Artificial Sequence
  primer
ctgcaggcagagaaaggtagg

SEQ ID NO: 130246 - DNA, 20 bp, Artificial Sequence
  primer
cgtctttgcaactcctctgg

SEQ ID NO: 130247 - DNA, 21 bp, Artificial Sequence
  primer
ttgtaacaactgctgctctgg

SEQ ID NO: 130248 - DNA, 20 bp, Artificial Sequence
  primer
cagctcaggcctttcactcc

SEQ ID NO: 130249 - DNA, 20 bp, Artificial Sequence
  primer
caggagcccactatgtccag

SEQ ID NO: 130250 - DNA, 21 bp, Artificial Sequence
  primer
ctgccttgcctaatctgatgg

SEQ ID NO: 130251 - DNA, 38 bp, Artificial Sequence
  primer
gtaaaacgacggccagtcctcagtccagcagaaacctc

SEQ ID NO: 130252 - DNA, 38 bp, Artificial Sequence
  primer
gtaaaacgacggccagtttctaacactcagtgctgggc

SEQ ID NO: 130253 - DNA, 22 bp, Artificial Sequence
  primer
gggataaagaaacccatgaagg

SEQ ID NO: 130254 - DNA, 21 bp, Artificial Sequence
  primer
gacttcatacgcccagtttcc

SEQ ID NO: 130255 - DNA, 21 bp, Artificial Sequence
  primer
gaggacaggagcagtgggtag

SEQ ID NO: 130256 - DNA, 38 bp, Artificial Sequence
  primer
gtaaaacgacggccagttaggccctaaagtctccaggc

SEQ ID NO: 130257 - DNA, 38 bp, Artificial Sequence
  primer
gtaaaacgacggccagtaatccctgtggaaacagatgc

SEQ ID NO: 130258 - DNA, 40 bp, Artificial Sequence
  primer
gtaaaacgacggccagttcaaacaaacacagacatatggg

SEQ ID NO: 130259 - DNA, 20 bp, Artificial Sequence
  primer
agtgcactcgtccagaggtg

SEQ ID NO: 130260 - DNA, 38 bp, Artificial Sequence
  primer
gtaaaacgacggccagtctgctgatacaggaggcattg

SEQ ID NO: 130261 - DNA, 21 bp, Artificial Sequence
  primer
tttgaaaccaacaaggcactg

SEQ ID NO: 130262 - DNA, 21 bp, Artificial Sequence
  primer
cctaaggaaggacactctgcg

SEQ ID NO: 130263 - DNA, 21 bp, Artificial Sequence
  primer
cagggtgggtaggaagtgaag

SEQ ID NO: 130264 - DNA, 21 bp, Artificial Sequence
  primer
gggaggaaatgtgacaaggac

SEQ ID NO: 130265 - DNA, 21 bp, Artificial Sequence
  primer
acgccagttcctctctagctg

SEQ ID NO: 130266 - DNA, 20 bp, Artificial Sequence
  primer
catcctcagtctcctggctg

SEQ ID NO: 130267 - DNA, 20 bp, Artificial Sequence
  primer
tttacagcgtccttcttgcc

SEQ ID NO: 130268 - DNA, 38 bp, Artificial Sequence
  primer
gtaaaacgacggccagtctttgaacatctggcctggac

SEQ ID NO: 130269 - DNA, 21 bp, Artificial Sequence
  primer
tcactgaaagcaaccgatgtc

SEQ ID NO: 130270 - DNA, 21 bp, Artificial Sequence
  primer
cttgatacccacatcctcacg

SEQ ID NO: 130271 - DNA, 20 bp, Artificial Sequence
  primer
catccgatcgtccttcactc

SEQ ID NO: 130272 - DNA, 38 bp, Artificial Sequence
  primer
gtaaaacgacggccagtagatctgcagaccagagggag

SEQ ID NO: 130273 - DNA, 21 bp, Artificial Sequence
  primer
acacccattgctgaaggaaac

SEQ ID NO: 130274 - DNA, 21 bp, Artificial Sequence
  primer
cttgacatttgatgtgcctgg

SEQ ID NO: 130275 - DNA, 38 bp, Artificial Sequence
  primer
gtaaaacgacggccagtcatgttccaccctgagatgag

SEQ ID NO: 130276 - DNA, 38 bp, Artificial Sequence
  primer
gtaaaacgacggccagtgatgcggtcttgcattatcac

SEQ ID NO: 130277 - DNA, 21 bp, Artificial Sequence
  primer
tggtccctgctaaagaccaac

SEQ ID NO: 130278 - DNA, 38 bp, Artificial Sequence
  primer
gtaaaacgacggccagtgccctctttcctcttccactc

SEQ ID NO: 130279 - DNA, 40 bp, Artificial Sequence
  primer
gtaaaacgacggccagtaaatgggctccttactgattgag

SEQ ID NO: 130280 - DNA, 21 bp, Artificial Sequence
  primer
ctctccctcatccctagttcg

SEQ ID NO: 130281 - DNA, 21 bp, Artificial Sequence
  primer
gcctctcccttattgcacaac

SEQ ID NO: 130282 - DNA, 21 bp, Artificial Sequence
  primer
ggagggaagggacatcagtag

SEQ ID NO: 130283 - DNA, 21 bp, Artificial Sequence
  primer
tttccgaccagacacagtcac

SEQ ID NO: 130284 - DNA, 21 bp, Artificial Sequence
  primer
cctcaggtaaatgagggcaac

SEQ ID NO: 130285 - DNA, 21 bp, Artificial Sequence
  primer
cctgccagttaagggattcag

SEQ ID NO: 130286 - DNA, 21 bp, Artificial Sequence
  primer
ttgtatctcccacaaaggcac

SEQ ID NO: 130287 - DNA, 38 bp, Artificial Sequence
  primer
gtaaaacgacggccagtccaggaagagggagagacagg

SEQ ID NO: 130288 - DNA, 22 bp, Artificial Sequence
  primer
tgtccgcttagagactgacctc

SEQ ID NO: 130289 - DNA, 21 bp, Artificial Sequence
  primer
ggctgccatagtgatgaaatg

SEQ ID NO: 130290 - DNA, 38 bp, Artificial Sequence
  primer
gtaaaacgacggccagttcagctccagaacgtcatacc

SEQ ID NO: 130291 - DNA, 38 bp, Artificial Sequence
  primer
gtaaaacgacggccagttgggtagctgttctggatgtg

SEQ ID NO: 130292 - DNA, 22 bp, Artificial Sequence
  primer
aagctccttcagcttgtctgtg

SEQ ID NO: 130293 - DNA, 38 bp, Artificial Sequence
  primer
gtaaaacgacggccagtggtccatgtttccctcaaatc

SEQ ID NO: 130294 - DNA, 21 bp, Artificial Sequence
  primer
gtgtggcttgttattgtgcag

SEQ ID NO: 130295 - DNA, 24 bp, Artificial Sequence
  primer
ttcctgccttgattactctttacc

SEQ ID NO: 130296 - DNA, 22 bp, Artificial Sequence
  primer
ggcctatgtgaagcttctttca

SEQ ID NO: 130297 - DNA, 42 bp, Artificial Sequence
  primer
gtaaaacgacggccagttttctatgcatatactgagcattca

SEQ ID NO: 130298 - DNA, 43 bp, Artificial Sequence
  primer
gtaaaacgacggccagtcaggaatttctcagtcataaagacaa

SEQ ID NO: 130299 - DNA, 27 bp, Artificial Sequence
  primer
gggtatgagttaaatgggtgtatactg

SEQ ID NO: 130300 - DNA, 24 bp, Artificial Sequence
  primer
tttgcataagatgaaattgcctaa

SEQ ID NO: 130301 - DNA, 38 bp, Artificial Sequence
  primer
gtaaaacgacggccagtgacttgtgctctgtggcattc

SEQ ID NO: 130302 - DNA, 39 bp, Artificial Sequence
  primer
gtaaaacgacggccagtggcctgatgctttcttaatacc

SEQ ID NO: 130303 - DNA, 36 bp, Artificial Sequence
  primer
gtaaaacgacggccagtgtgcagtttgggaattggg

SEQ ID NO: 130304 - DNA, 21 bp, Artificial Sequence
  primer
caatcatgggatgggtgtatg

SEQ ID NO: 130305 - DNA, 42 bp, Artificial Sequence
  primer
gtaaaacgacggccagtttgtcctactgtgctattgaacaac

SEQ ID NO: 130306 - DNA, 38 bp, Artificial Sequence
  primer
gtaaaacgacggccagttgctggtattgtacggaaagg

SEQ ID NO: 130307 - DNA, 22 bp, Artificial Sequence
  primer
ttcaataccacacaatccatcc

SEQ ID NO: 130308 - DNA, 22 bp, Artificial Sequence
  primer
agcctttccaaagaaactgatg

SEQ ID NO: 130309 - DNA, 18 bp, Artificial Sequence
  primer
caaaccaggcgtttgcac

SEQ ID NO: 130310 - DNA, 36 bp, Artificial Sequence
  primer
gtaaaacgacggccagtcctctttcctaccctcccg

SEQ ID NO: 130311 - DNA, 21 bp, Artificial Sequence
  primer
ccagtgctatgagtctgggtg

SEQ ID NO: 130312 - DNA, 46 bp, Artificial Sequence
  primer
gtaaaacgacggccagtaacaactgatatagaaggtataagttggc

SEQ ID NO: 130313 - DNA, 21 bp, Artificial Sequence
  primer
tttgacagccaaatcatgcta

SEQ ID NO: 130314 - DNA, 44 bp, Artificial Sequence
  primer
gtaaaacgacggccagttcctttctagctctacataaataccaa

SEQ ID NO: 130315 - DNA, 20 bp, Artificial Sequence
  primer
catgagccactgctcctagc

SEQ ID NO: 130316 - DNA, 38 bp, Artificial Sequence
  primer
gtaaaacgacggccagtggcctcctttacaatttggtc

SEQ ID NO: 130317 - DNA, 37 bp, Artificial Sequence
  primer
gtaaaacgacggccagtaatttggcaatgtgaggtcc

SEQ ID NO: 130318 - DNA, 21 bp, Artificial Sequence
  primer
cccttcaacctctggctattg

SEQ ID NO: 130319 - DNA, 20 bp, Artificial Sequence
  primer
atcaccaaagctgagggtgg

SEQ ID NO: 130320 - DNA, 35 bp, Artificial Sequence
  primer
gtaaaacgacggccagtaggtgtgacccaccatgc

SEQ ID NO: 130321 - DNA, 38 bp, Artificial Sequence
  primer
gtaaaacgacggccagtttgcaaacatattctggagcc

SEQ ID NO: 130322 - DNA, 39 bp, Artificial Sequence
  primer
gtaaaacgacggccagtgaggtgaggagggaattcaaag

SEQ ID NO: 130323 - DNA, 38 bp, Artificial Sequence
  primer
gtaaaacgacggccagtaagagctcgtaatcgtcaggc

SEQ ID NO: 130324 - DNA, 21 bp, Artificial Sequence
  primer
agagttggacccagacacagc

SEQ ID NO: 130325 - DNA, 21 bp, Artificial Sequence
  primer
caggagaaagtggtggctctc

SEQ ID NO: 130326 - DNA, 37 bp, Artificial Sequence
  primer
gtaaaacgacggccagtgaggtcaagctctgctggag

SEQ ID NO: 130327 - DNA, 21 bp, Artificial Sequence
  primer
cattattacgtcctcaccggg

SEQ ID NO: 130328 - DNA, 38 bp, Artificial Sequence
  primer
gtaaaacgacggccagtacactggaaatcaggtttggg

SEQ ID NO: 130329 - DNA, 20 bp, Artificial Sequence
  primer
cacttgaatctgggaggtgg

SEQ ID NO: 130330 - DNA, 39 bp, Artificial Sequence
  primer
gtaaaacgacggccagttcaactctgtctcaaggaaccc

SEQ ID NO: 130331 - DNA, 21 bp, Artificial Sequence
  primer
cgaggcctgtttaatgatgac

SEQ ID NO: 130332 - DNA, 21 bp, Artificial Sequence
  primer
acagcctggttcaccagaaac

SEQ ID NO: 130333 - DNA, 38 bp, Artificial Sequence
  primer
gtaaaacgacggccagtaaaccacaacaacagaggcag

SEQ ID NO: 130334 - DNA, 21 bp, Artificial Sequence
  primer
gacagcagaaagacaagcagg

SEQ ID NO: 130335 - DNA, 38 bp, Artificial Sequence
  primer
gtaaaacgacggccagtaatgcacaggctacacaaagc

SEQ ID NO: 130336 - DNA, 21 bp, Artificial Sequence
  primer
agcctcagcgataaagagcag

SEQ ID NO: 130337 - DNA, 21 bp, Artificial Sequence
  primer
ggctgcagtgagctataatgg

SEQ ID NO: 130338 - DNA, 21 bp, Artificial Sequence
  primer
cctccttaacagctggcttcc

SEQ ID NO: 130339 - DNA, 27 bp, Artificial Sequence
  primer
ttcacaaagtaatacctgtcacctacc

SEQ ID NO: 130340 - DNA, 36 bp, Artificial Sequence
  primer
gtaaaacgacggccagtgcaacaaagcgagaccctc

SEQ ID NO: 130341 - DNA, 38 bp, Artificial Sequence
  primer
gtaaaacgacggccagtcaacgggcagattacttgagg

SEQ ID NO: 130342 - DNA, 38 bp, Artificial Sequence
  primer
gtaaaacgacggccagtaagagcagcagtgcttatggc

SEQ ID NO: 130343 - DNA, 40 bp, Artificial Sequence
  primer
gtaaaacgacggccagtcagaagccaggtctttctgtttc

SEQ ID NO: 130344 - DNA, 21 bp, Artificial Sequence
  primer
atgtgtgtatgggaggcactg

SEQ ID NO: 130345 - DNA, 38 bp, Artificial Sequence
  primer
gtaaaacgacggccagtcgtagtgcctttccacctgtc

SEQ ID NO: 130346 - DNA, 22 bp, Artificial Sequence
  primer
tctcacagaagaaacaaaccca

SEQ ID NO: 130347 - DNA, 21 bp, Artificial Sequence
  primer
tatgggtttgtcatccttccc

SEQ ID NO: 130348 - DNA, 38 bp, Artificial Sequence
  primer
gtaaaacgacggccagtgtgcagctcatcaatcactcc

SEQ ID NO: 130349 - DNA, 21 bp, Artificial Sequence
  primer
cagcacagtggcagtctcttg

SEQ ID NO: 130350 - DNA, 38 bp, Artificial Sequence
  primer
gtaaaacgacggccagtggtacaacaggagcaggaagg

SEQ ID NO: 130351 - DNA, 38 bp, Artificial Sequence
  primer
gtaaaacgacggccagtaacccatctctcccactcatc

SEQ ID NO: 130352 - DNA, 19 bp, Artificial Sequence
  primer
cccgccacctgagataagt

SEQ ID NO: 130353 - DNA, 35 bp, Artificial Sequence
  primer
gtaaaacgacggccagtacctgagcaggagggctg

SEQ ID NO: 130354 - DNA, 21 bp, Artificial Sequence
  primer
gcaactcgctctgaggaagac

SEQ ID NO: 130355 - DNA, 21 bp, Artificial Sequence
  primer
acacccaggttcccttcattc

SEQ ID NO: 130356 - DNA, 38 bp, Artificial Sequence
  primer
gtaaaacgacggccagtttgacagaacctggctaaggc

SEQ ID NO: 130357 - DNA, 22 bp, Artificial Sequence
  primer
aaaggacatacaggaggagctg

SEQ ID NO: 130358 - DNA, 22 bp, Artificial Sequence
  primer
gctcgtacactaggtgcctttc

SEQ ID NO: 130359 - DNA, 21 bp, Artificial Sequence
  primer
ctctctgaactcctcagcagg

SEQ ID NO: 130360 - DNA, 41 bp, Artificial Sequence
  primer
gtaaaacgacggccagttcctcttggtgtttagtaagcaaa

SEQ ID NO: 130361 - DNA, 21 bp, Artificial Sequence
  primer
aatactggatggagcccaaac

SEQ ID NO: 130362 - DNA, 21 bp, Artificial Sequence
  primer
atgtggtttaccactggcagc

SEQ ID NO: 130363 - DNA, 38 bp, Artificial Sequence
  primer
gtaaaacgacggccagtcacgcacacaaattcattctc

SEQ ID NO: 130364 - DNA, 40 bp, Artificial Sequence
  primer
gtaaaacgacggccagtaacttagggaaattgaggcactg

SEQ ID NO: 130365 - DNA, 27 bp, Artificial Sequence
  primer
ccactggtaattcagaagtatataaca

SEQ ID NO: 130366 - DNA, 38 bp, Artificial Sequence
  primer
gtaaaacgacggccagttcctggagagcaaaggtattg

SEQ ID NO: 130367 - DNA, 20 bp, Artificial Sequence
  primer
cccactttacctcgctctcc

SEQ ID NO: 130368 - DNA, 18 bp, Artificial Sequence
  primer
gggccagatcaggaggac

SEQ ID NO: 130369 - DNA, 21 bp, Artificial Sequence
  primer
cgacaagagccagaccctatc

SEQ ID NO: 130370 - DNA, 22 bp, Artificial Sequence
  primer
ttggtatttccattgattgctg

SEQ ID NO: 130371 - DNA, 39 bp, Artificial Sequence
  primer
gtaaaacgacggccagttggacagtacttgaatgggaag

SEQ ID NO: 130372 - DNA, 20 bp, Artificial Sequence
  primer
gggaggtaggaagaagggaa

SEQ ID NO: 130373 - DNA, 21 bp, Artificial Sequence
  primer
tgaagggaaccttgaatgatg

SEQ ID NO: 130374 - DNA, 21 bp, Artificial Sequence
  primer
aactgggaaccacctcctttc

SEQ ID NO: 130375 - DNA, 21 bp, Artificial Sequence
  primer
gacacggcttcgagtctcttc

SEQ ID NO: 130376 - DNA, 21 bp, Artificial Sequence
  primer
tcaaagccaaggtttcctcac

SEQ ID NO: 130377 - DNA, 20 bp, Artificial Sequence
  primer
acctctatggctgcagggag

SEQ ID NO: 130378 - DNA, 38 bp, Artificial Sequence
  primer
gtaaaacgacggccagtcagcgtagacctgatttcacc

SEQ ID NO: 130379 - DNA, 38 bp, Artificial Sequence
  primer
gtaaaacgacggccagtcttcctatatcccagctccca

SEQ ID NO: 130380 - DNA, 29 bp, Artificial Sequence
  primer
gccagtggtcagttatacatattattcag

SEQ ID NO: 130381 - DNA, 21 bp, Artificial Sequence
  primer
cactaaaccagggcaaagatg

SEQ ID NO: 130382 - DNA, 38 bp, Artificial Sequence
  primer
gtaaaacgacggccagttagcccatcctttccacttcc

SEQ ID NO: 130383 - DNA, 38 bp, Artificial Sequence
  primer
gtaaaacgacggccagtcttaaaggcaagagcaggcac

SEQ ID NO: 130384 - DNA, 42 bp, Artificial Sequence
  primer
gtaaaacgacggccagtatgaattctctcaaatcctaaatcg

SEQ ID NO: 130385 - DNA, 19 bp, Artificial Sequence
  primer
tgtcatcaccgcactccag

SEQ ID NO: 130386 - DNA, 23 bp, Artificial Sequence
  primer
cacccaatagcagcacttgtatc

SEQ ID NO: 130387 - DNA, 38 bp, Artificial Sequence
  primer
gtaaaacgacggccagtaaacctttgccaaacattctg

SEQ ID NO: 130388 - DNA, 20 bp, Artificial Sequence
  primer
acacccagccattctcagtg

SEQ ID NO: 130389 - DNA, 27 bp, Artificial Sequence
  primer
aagtcatgagataatatgccattcaag

SEQ ID NO: 130390 - DNA, 38 bp, Artificial Sequence
  primer
gtaaaacgacggccagtagaatgcaggctcagttccac

SEQ ID NO: 130391 - DNA, 40 bp, Artificial Sequence
  primer
gtaaaacgacggccagtcctgaatattatttcccgaaagg

SEQ ID NO: 130392 - DNA, 42 bp, Artificial Sequence
  primer
gtaaaacgacggccagtcactacactggatttatggcatttc

SEQ ID NO: 130393 - DNA, 41 bp, Artificial Sequence
  primer
gtaaaacgacggccagtgatgtaccaactgttgagatggag

SEQ ID NO: 130394 - DNA, 40 bp, Artificial Sequence
  primer
gtaaaacgacggccagttgcttcttacctcaagtgtgagc

SEQ ID NO: 130395 - DNA, 39 bp, Artificial Sequence
  primer
gtaaaacgacggccagttcagccttatcctctgctcttt

SEQ ID NO: 130396 - DNA, 38 bp, Artificial Sequence
  primer
gtaaaacgacggccagttccctacattaaatgccctcc

SEQ ID NO: 130397 - DNA, 43 bp, Artificial Sequence
  primer
gtaaaacgacggccagttctcagcaagtacagcactagtaacc

SEQ ID NO: 130398 - DNA, 37 bp, Artificial Sequence
  primer
gtaaaacgacggccagtgatcctcctgcttcccaaag

SEQ ID NO: 130399 - DNA, 22 bp, Artificial Sequence
  primer
cccaaacactcacaattcaatg

SEQ ID NO: 130400 - DNA, 20 bp, Artificial Sequence
  primer
tttcactgatggcaagatgc

SEQ ID NO: 130401 - DNA, 20 bp, Artificial Sequence
  primer
gatgccaacccactgaaatc

SEQ ID NO: 130402 - DNA, 22 bp, Artificial Sequence
  primer
tgattatcagcctttcctgtcc

SEQ ID NO: 130403 - DNA, 23 bp, Artificial Sequence
  primer
aatccagggatggaaataagaaa

SEQ ID NO: 130404 - DNA, 38 bp, Artificial Sequence
  primer
gtaaaacgacggccagtcactgtgcctgagtaaccgag

SEQ ID NO: 130405 - DNA, 21 bp, Artificial Sequence
  primer
ggaggaaatgtggctatttgg

SEQ ID NO: 130406 - DNA, 18 bp, Artificial Sequence
  primer
ttgcatgaacccgagagg

SEQ ID NO: 130407 - DNA, 38 bp, Artificial Sequence
  primer
gtaaaacgacggccagtgtctctttggatggaaggctg

SEQ ID NO: 130408 - DNA, 21 bp, Artificial Sequence
  primer
actattctgccacaagggtcc

SEQ ID NO: 130409 - DNA, 37 bp, Artificial Sequence
  primer
gtaaaacgacggccagtttatgagggccaacatcctg

SEQ ID NO: 130410 - DNA, 23 bp, Artificial Sequence
  primer
aacatccaaatccttaacactgg

SEQ ID NO: 130411 - DNA, 37 bp, Artificial Sequence
  primer
gtaaaacgacggccagtcaggaacagggacccaaatc

SEQ ID NO: 130412 - DNA, 21 bp, Artificial Sequence
  primer
acgactacatcagctctgggc

SEQ ID NO: 130413 - DNA, 21 bp, Artificial Sequence
  primer
ggtccctaattccttccctcc

SEQ ID NO: 130414 - DNA, 18 bp, Artificial Sequence
  primer
gggagctgagatcgtgcc

SEQ ID NO: 130415 - DNA, 21 bp, Artificial Sequence
  primer
tctgttcctggttggcctatg

SEQ ID NO: 130416 - DNA, 21 bp, Artificial Sequence
  primer
tcctggttctgtcactagccc

SEQ ID NO: 130417 - DNA, 22 bp, Artificial Sequence
  primer
ggattcttgatactgctttgcc

SEQ ID NO: 130418 - DNA, 40 bp, Artificial Sequence
  primer
gtaaaacgacggccagtcaaagatctccaatgcattcttc

SEQ ID NO: 130419 - DNA, 38 bp, Artificial Sequence
  primer
gtaaaacgacggccagtcctacctgaactcagccaacc

SEQ ID NO: 130420 - DNA, 43 bp, Artificial Sequence
  primer
gtaaaacgacggccagtcattgactctcagtctagtcttccaa

SEQ ID NO: 130421 - DNA, 21 bp, Artificial Sequence
  primer
ttgacaaagccatatggaagg

SEQ ID NO: 130422 - DNA, 21 bp, Artificial Sequence
  primer
cctgcttagcaaatagcccac

SEQ ID NO: 130423 - DNA, 38 bp, Artificial Sequence
  primer
gtaaaacgacggccagttggctagcacagacctagctg

SEQ ID NO: 130424 - DNA, 22 bp, Artificial Sequence
  primer
aactcagagcaggtagtcaccg

SEQ ID NO: 130425 - DNA, 40 bp, Artificial Sequence
  primer
gtaaaacgacggccagtaagtgctaaatcctggtcagtcc

SEQ ID NO: 130426 - DNA, 23 bp, Artificial Sequence
  primer
tgctgaaacaggatgaaggatac

SEQ ID NO: 130427 - DNA, 21 bp, Artificial Sequence
  primer
ggttaaggagatagggcccag

SEQ ID NO: 130428 - DNA, 38 bp, Artificial Sequence
  primer
gtaaaacgacggccagtttatggcttatgaccctgctg

SEQ ID NO: 130429 - DNA, 38 bp, Artificial Sequence
  primer
gtaaaacgacggccagtacttgccactccaagcctatg

SEQ ID NO: 130430 - DNA, 21 bp, Artificial Sequence
  primer
acgcagggagaaatactttgg

SEQ ID NO: 130431 - DNA, 21 bp, Artificial Sequence
  primer
ccctgtccacattggagattc

SEQ ID NO: 130432 - DNA, 40 bp, Artificial Sequence
  primer
gtaaaacgacggccagttcaccatgcctaatagcctacac

SEQ ID NO: 130433 - DNA, 24 bp, Artificial Sequence
  primer
tctcccttacctggaataaacctc

SEQ ID NO: 130434 - DNA, 43 bp, Artificial Sequence
  primer
gtaaaacgacggccagtgaggtaatttcccactgcatagatac

SEQ ID NO: 130435 - DNA, 23 bp, Artificial Sequence
  primer
caaacgtctgttgtcaaatctgg

SEQ ID NO: 130436 - DNA, 19 bp, Artificial Sequence
  primer
gaatgctgcgtctgtgtgg

SEQ ID NO: 130437 - DNA, 21 bp, Artificial Sequence
  primer
tgtatgacctctgacccatgc

SEQ ID NO: 130438 - DNA, 38 bp, Artificial Sequence
  primer
gtaaaacgacggccagtgctaagtagctgaaacgcagc

SEQ ID NO: 130439 - DNA, 36 bp, Artificial Sequence
  primer
gtaaaacgacggccagtgcaatgcagaaatgcaagc

SEQ ID NO: 130440 - DNA, 39 bp, Artificial Sequence
  primer
gtaaaacgacggccagtaacctgaaagcaaagaggtgtc

SEQ ID NO: 130441 - DNA, 25 bp, Artificial Sequence
  primer
gacagatgctaactccagctttatg

SEQ ID NO: 130442 - DNA, 37 bp, Artificial Sequence
  primer
gtaaaacgacggccagtactgtgtgagcaggacaggg

SEQ ID NO: 130443 - DNA, 21 bp, Artificial Sequence
  primer
gggcaacaagagtgaaactcc

SEQ ID NO: 130444 - DNA, 38 bp, Artificial Sequence
  primer
gtaaaacgacggccagtagccacacccaaggaactaag

SEQ ID NO: 130445 - DNA, 22 bp, Artificial Sequence
  primer
ccatcttcacagaacaagaccc

SEQ ID NO: 130446 - DNA, 21 bp, Artificial Sequence
  primer
tcgttcaatgaagtgtttccc

SEQ ID NO: 130447 - DNA, 39 bp, Artificial Sequence
  primer
gtaaaacgacggccagtggctttgccacactctttacac

SEQ ID NO: 130448 - DNA, 38 bp, Artificial Sequence
  primer
gtaaaacgacggccagtctaaaggatttcccgcatttg

SEQ ID NO: 130449 - DNA, 38 bp, Artificial Sequence
  primer
gtaaaacgacggccagtccagtgtgaatgacctgatgc

SEQ ID NO: 130450 - DNA, 39 bp, Artificial Sequence
  primer
gtaaaacgacggccagttgtaaggtttgtactccggctg

SEQ ID NO: 130451 - DNA, 38 bp, Artificial Sequence
  primer
gtaaaacgacggccagtcaaaggagaatgtgcggtatg

SEQ ID NO: 130452 - DNA, 26 bp, Artificial Sequence
  primer
tcctctctagttctaaatgatgctgt

SEQ ID NO: 130453 - DNA, 21 bp, Artificial Sequence
  primer
tgagcaagaggattgcagaat

SEQ ID NO: 130454 - DNA, 20 bp, Artificial Sequence
  primer
atgcagtcgtgttggaaagg

SEQ ID NO: 130455 - DNA, 19 bp, Artificial Sequence
  primer
acccttcccacccagaatc

SEQ ID NO: 130456 - DNA, 18 bp, Artificial Sequence
  primer
gaggtgccaagtgcccag

SEQ ID NO: 130457 - DNA, 37 bp, Artificial Sequence
  primer
gtaaaacgacggccagtcccagagagaatgcacaacc

SEQ ID NO: 130458 - DNA, 21 bp, Artificial Sequence
  primer
gttcatgctctccacgtcttg

SEQ ID NO: 130459 - DNA, 21 bp, Artificial Sequence
  primer
ctagggtgctttggaaacagg

SEQ ID NO: 130460 - DNA, 21 bp, Artificial Sequence
  primer
tctctgcctcagacatcatgg

SEQ ID NO: 130461 - DNA, 21 bp, Artificial Sequence
  primer
gtgcattggagagaggaggtg

SEQ ID NO: 130462 - DNA, 38 bp, Artificial Sequence
  primer
gtaaaacgacggccagtggcttctctttgctaacaggg

SEQ ID NO: 130463 - DNA, 21 bp, Artificial Sequence
  primer
ccctccatttctgtctccaag

SEQ ID NO: 130464 - DNA, 21 bp, Artificial Sequence
  primer
aggctgtagtgttgatgctgg

SEQ ID NO: 130465 - DNA, 38 bp, Artificial Sequence
  primer
gtaaaacgacggccagtgtaggtgggtagctgtgggtg

SEQ ID NO: 130466 - DNA, 21 bp, Artificial Sequence
  primer
atgtcacctgtgatgacccag

SEQ ID NO: 130467 - DNA, 21 bp, Artificial Sequence
  primer
tcctcagtgctgactggagac

SEQ ID NO: 130468 - DNA, 21 bp, Artificial Sequence
  primer
atgaatgaggaccaaggcttc

SEQ ID NO: 130469 - DNA, 21 bp, Artificial Sequence
  primer
acactttaagggctggtggag

SEQ ID NO: 130470 - DNA, 21 bp, Artificial Sequence
  primer
agcacagggttctctttcagg

SEQ ID NO: 130471 - DNA, 21 bp, Artificial Sequence
  primer
aagtcctctctttcccagcag

SEQ ID NO: 130472 - DNA, 21 bp, Artificial Sequence
  primer
aatctaggagtggaggttgcg

SEQ ID NO: 130473 - DNA, 38 bp, Artificial Sequence
  primer
gtaaaacgacggccagtgcgtcagggactctaaaggtg

SEQ ID NO: 130474 - DNA, 38 bp, Artificial Sequence
  primer
gtaaaacgacggccagttaagaatcgacattgggccag

SEQ ID NO: 130475 - DNA, 21 bp, Artificial Sequence
  primer
tacccttggtccactcgtagg

SEQ ID NO: 130476 - DNA, 38 bp, Artificial Sequence
  primer
gtaaaacgacggccagttctcccaggatgctgtaaacc

SEQ ID NO: 130477 - DNA, 38 bp, Artificial Sequence
  primer
gtaaaacgacggccagtcctccagagtgggtgtgaatc

SEQ ID NO: 130478 - DNA, 37 bp, Artificial Sequence
  primer
gtaaaacgacggccagtctccacagggacaggtgatg

SEQ ID NO: 130479 - DNA, 21 bp, Artificial Sequence
  primer
tgtgtgtgtgtgtccatcacc

SEQ ID NO: 130480 - DNA, 37 bp, Artificial Sequence
  primer
gtaaaacgacggccagtcctctaggcagatgcttccc

SEQ ID NO: 130481 - DNA, 38 bp, Artificial Sequence
  primer
gtaaaacgacggccagtcctgtgaggaaagtgagggtc

SEQ ID NO: 130482 - DNA, 21 bp, Artificial Sequence
  primer
agggtgaatgtgaaggaggtg

SEQ ID NO: 130483 - DNA, 20 bp, Artificial Sequence
  primer
ctgggaggctcagtgtcaag

SEQ ID NO: 130484 - DNA, 37 bp, Artificial Sequence
  primer
gtaaaacgacggccagtcaggcaccaacaacaggaag

SEQ ID NO: 130485 - DNA, 19 bp, Artificial Sequence
  primer
tcacgtgatagactgcggg

SEQ ID NO: 130486 - DNA, 21 bp, Artificial Sequence
  primer
aagttaaggcacagagcaggc

SEQ ID NO: 130487 - DNA, 38 bp, Artificial Sequence
  primer
gtaaaacgacggccagttcagatgatactgctgccctc

SEQ ID NO: 130488 - DNA, 21 bp, Artificial Sequence
  primer
tttagctgcggtgagagatcc

SEQ ID NO: 130489 - DNA, 21 bp, Artificial Sequence
  primer
cagcctgggtaacaaagagtg

SEQ ID NO: 130490 - DNA, 22 bp, Artificial Sequence
  primer
cttgggtgtcatctgttctttg

SEQ ID NO: 130491 - DNA, 38 bp, Artificial Sequence
  primer
gtaaaacgacggccagtgccttgtgcctccaaacttac

SEQ ID NO: 130492 - DNA, 21 bp, Artificial Sequence
  primer
tgccatcaagagtgtcactgg

SEQ ID NO: 130493 - DNA, 39 bp, Artificial Sequence
  primer
gtaaaacgacggccagtgactctgaatgacagcctccac

SEQ ID NO: 130494 - DNA, 39 bp, Artificial Sequence
  primer
gtaaaacgacggccagttcgtgctgatatttgtgtgagg

SEQ ID NO: 130495 - DNA, 38 bp, Artificial Sequence
  primer
gtaaaacgacggccagtaaggaagtgccaggcaaatag

SEQ ID NO: 130496 - DNA, 20 bp, Artificial Sequence
  primer
tgactcaaagggctccactg

SEQ ID NO: 130497 - DNA, 38 bp, Artificial Sequence
  primer
gtaaaacgacggccagtgccaaaggctggagtagtacc

SEQ ID NO: 130498 - DNA, 21 bp, Artificial Sequence
  primer
ttcgacggaatgtttatgcag

SEQ ID NO: 130499 - DNA, 38 bp, Artificial Sequence
  primer
gtaaaacgacggccagtattcttaaacgtggaaggccc

SEQ ID NO: 130500 - DNA, 22 bp, Artificial Sequence
  primer
gccaataggttggcatagaaac

SEQ ID NO: 130501 - DNA, 37 bp, Artificial Sequence
  primer
gtaaaacgacggccagttggtaagctgcccatctaca

SEQ ID NO: 130502 - DNA, 25 bp, Artificial Sequence
  primer
cagattctttcaagactcaagccta

SEQ ID NO: 130503 - DNA, 42 bp, Artificial Sequence
  primer
gtaaaacgacggccagtacgagatcctagttacccaactttc

SEQ ID NO: 130504 - DNA, 22 bp, Artificial Sequence
  primer
tgggtgataggaggagactctg

SEQ ID NO: 130505 - DNA, 21 bp, Artificial Sequence
  primer
atttgccctcaggtcctacag

SEQ ID NO: 130506 - DNA, 21 bp, Artificial Sequence
  primer
gagatcaggatgcagggaatc

SEQ ID NO: 130507 - DNA, 40 bp, Artificial Sequence
  primer
gtaaaacgacggccagttgtctggacataaacaagcaatc

SEQ ID NO: 130508 - DNA, 37 bp, Artificial Sequence
  primer
gtaaaacgacggccagttgttaacaatgggtcaagcg

SEQ ID NO: 130509 - DNA, 37 bp, Artificial Sequence
  primer
gtaaaacgacggccagtgcctaatgccacaagcagag

SEQ ID NO: 130510 - DNA, 21 bp, Artificial Sequence
  primer
ggcagaaagcaaatatccctc

SEQ ID NO: 130511 - DNA, 22 bp, Artificial Sequence
  primer
tgcttgcttgatatttgtccac

SEQ ID NO: 130512 - DNA, 42 bp, Artificial Sequence
  primer
gtaaaacgacggccagtgaactctatgtcattctaccaaccc

SEQ ID NO: 130513 - DNA, 22 bp, Artificial Sequence
  primer
gagcggagagttggtttgtaag

SEQ ID NO: 130514 - DNA, 39 bp, Artificial Sequence
  primer
gtaaaacgacggccagttgtttaccgttgaactggtgtc

SEQ ID NO: 130515 - DNA, 21 bp, Artificial Sequence
  primer
tgtatttcccttcccttaccc

SEQ ID NO: 130516 - DNA, 38 bp, Artificial Sequence
  primer
gtaaaacgacggccagttaactgacgtcctcccactcc

SEQ ID NO: 130517 - DNA, 21 bp, Artificial Sequence
  primer
agggaaggtggagacagtcag

SEQ ID NO: 130518 - DNA, 40 bp, Artificial Sequence
  primer
gtaaaacgacggccagtttggagttgagagcaaggttaag

SEQ ID NO: 130519 - DNA, 23 bp, Artificial Sequence
  primer
tttgacaggcagtaagtcaactg

SEQ ID NO: 130520 - DNA, 38 bp, Artificial Sequence
  primer
gtaaaacgacggccagtcataccaaagttacccagggc

SEQ ID NO: 130521 - DNA, 20 bp, Artificial Sequence
  primer
gggaagagcaagaccctgtc

SEQ ID NO: 130522 - DNA, 38 bp, Artificial Sequence
  primer
gtaaaacgacggccagtacaacgggcttaaagtgaagg

SEQ ID NO: 130523 - DNA, 21 bp, Artificial Sequence
  primer
caatcacagcaggctcagaac

SEQ ID NO: 130524 - DNA, 21 bp, Artificial Sequence
  primer
gctgacaacgatctgtccatc

SEQ ID NO: 130525 - DNA, 21 bp, Artificial Sequence
  primer
gggctcatcttggactctagc

SEQ ID NO: 130526 - DNA, 22 bp, Artificial Sequence
  primer
ttcaaaggtacccaaagtcctg

SEQ ID NO: 130527 - DNA, 38 bp, Artificial Sequence
  primer
gtaaaacgacggccagtctgaatctgcaagtggagcag

SEQ ID NO: 130528 - DNA, 38 bp, Artificial Sequence
  primer
gtaaaacgacggccagtgaggactgggaacacagaagc

SEQ ID NO: 130529 - DNA, 37 bp, Artificial Sequence
  primer
gtaaaacgacggccagtttacaagcatgcaccaccac

SEQ ID NO: 130530 - DNA, 38 bp, Artificial Sequence
  primer
gtaaaacgacggccagttcaggcactaagagtgaaggc

SEQ ID NO: 130531 - DNA, 21 bp, Artificial Sequence
  primer
tatttgccatttggcactttg

SEQ ID NO: 130532 - DNA, 21 bp, Artificial Sequence
  primer
ggaacaccaaggtcgtaggag

SEQ ID NO: 130533 - DNA, 21 bp, Artificial Sequence
  primer
ccaagaggataagtgatgccc

SEQ ID NO: 130534 - DNA, 21 bp, Artificial Sequence
  primer
actggacagacaggcactcag

SEQ ID NO: 130535 - DNA, 38 bp, Artificial Sequence
  primer
gtaaaacgacggccagttggagggttggtagacctctc

SEQ ID NO: 130536 - DNA, 36 bp, Artificial Sequence
  primer
gtaaaacgacggccagtggactggacccaagtgctc

SEQ ID NO: 130537 - DNA, 20 bp, Artificial Sequence
  primer
gtcccttactgtgcacggag

SEQ ID NO: 130538 - DNA, 21 bp, Artificial Sequence
  primer
aactggtccgaggacagaaac

SEQ ID NO: 130539 - DNA, 21 bp, Artificial Sequence
  primer
cgcccagtgctctttctacac

SEQ ID NO: 130540 - DNA, 36 bp, Artificial Sequence
  primer
gtaaaacgacggccagtaagcccgtgcctcctaatc

SEQ ID NO: 130541 - DNA, 38 bp, Artificial Sequence
  primer
gtaaaacgacggccagtggctcttactgctgcaacctg

SEQ ID NO: 130542 - DNA, 37 bp, Artificial Sequence
  primer
gtaaaacgacggccagtacctccatgagggagactgc

SEQ ID NO: 130543 - DNA, 21 bp, Artificial Sequence
  primer
tgtcattcctttgaggtgcag

SEQ ID NO: 130544 - DNA, 22 bp, Artificial Sequence
  primer
gggtcactaaagagcacaaacg

SEQ ID NO: 130545 - DNA, 20 bp, Artificial Sequence
  primer
actgcctcagagccacttcc

SEQ ID NO: 130546 - DNA, 37 bp, Artificial Sequence
  primer
gtaaaacgacggccagtctgggcgacagagactcctc

SEQ ID NO: 130547 - DNA, 38 bp, Artificial Sequence
  primer
gtaaaacgacggccagtagcttgacaggcatcagttcc

SEQ ID NO: 130548 - DNA, 38 bp, Artificial Sequence
  primer
gtaaaacgacggccagtagcaaatctgactgcatccac

SEQ ID NO: 130549 - DNA, 38 bp, Artificial Sequence
  primer
gtaaaacgacggccagtgagctgcaaggagacctaagc

SEQ ID NO: 130550 - DNA, 18 bp, Artificial Sequence
  primer
gcttgaaccagggaagca

SEQ ID NO: 130551 - DNA, 39 bp, Artificial Sequence
  primer
gtaaaacgacggccagttgcctccataacttctagcacc

SEQ ID NO: 130552 - DNA, 39 bp, Artificial Sequence
  primer
gtaaaacgacggccagttccttccgtaacagatccaaac

SEQ ID NO: 130553 - DNA, 39 bp, Artificial Sequence
  primer
gtaaaacgacggccagtcaatccaagttctcaaagtgcc

SEQ ID NO: 130554 - DNA, 44 bp, Artificial Sequence
  primer
gtaaaacgacggccagtctattatggttaccctttaaatgaggg

SEQ ID NO: 130555 - DNA, 42 bp, Artificial Sequence
  primer
gtaaaacgacggccagtttccaaatttctacaataagcatga

SEQ ID NO: 130556 - DNA, 40 bp, Artificial Sequence
  primer
gtaaaacgacggccagtggaaggctcgtgtcatgtttaag

SEQ ID NO: 130557 - DNA, 37 bp, Artificial Sequence
  primer
gtaaaacgacggccagtgttatcaacactgggccacg

SEQ ID NO: 130558 - DNA, 39 bp, Artificial Sequence
  primer
gtaaaacgacggccagtggtggaatgcatgacatatgag

SEQ ID NO: 130559 - DNA, 39 bp, Artificial Sequence
  primer
gtaaaacgacggccagtttgtatctggcctgtttgagtg

SEQ ID NO: 130560 - DNA, 39 bp, Artificial Sequence
  primer
gtaaaacgacggccagttgttcccaccttaggacatttg

SEQ ID NO: 130561 - DNA, 25 bp, Artificial Sequence
  primer
cagtgaagcaagtcacttcaatttc

SEQ ID NO: 130562 - DNA, 38 bp, Artificial Sequence
  primer
gtaaaacgacggccagttttgctgaaagaggattgcag

SEQ ID NO: 130563 - DNA, 38 bp, Artificial Sequence
  primer
gtaaaacgacggccagtttacaatgcctccagagaggg

SEQ ID NO: 130564 - DNA, 22 bp, Artificial Sequence
  primer
aaagtgagctatgggaacaagg

SEQ ID NO: 130565 - DNA, 21 bp, Artificial Sequence
  primer
ctgattggtggcaaataatgc

SEQ ID NO: 130566 - DNA, 42 bp, Artificial Sequence
  primer
gtaaaacgacggccagtgcaacttctagaacaatcaagggtc

SEQ ID NO: 130567 - DNA, 39 bp, Artificial Sequence
  primer
gtaaaacgacggccagtagtgcatttaattcccaattcc

SEQ ID NO: 130568 - DNA, 38 bp, Artificial Sequence
  primer
gtaaaacgacggccagtcgccataattggcatgttagg

SEQ ID NO: 130569 - DNA, 38 bp, Artificial Sequence
  primer
gtaaaacgacggccagtgaagctgcattcctccaaatc

SEQ ID NO: 130570 - DNA, 21 bp, Artificial Sequence
  primer
gatgcggtggattatcaatgg

SEQ ID NO: 130571 - DNA, 18 bp, Artificial Sequence
  primer
acactgggacctgttgcg

SEQ ID NO: 130572 - DNA, 28 bp, Artificial Sequence
  primer
cagaagtctcagtaatatcaattctcca

SEQ ID NO: 130573 - DNA, 21 bp, Artificial Sequence
  primer
aaagcaaatacggcaccatta

SEQ ID NO: 130574 - DNA, 39 bp, Artificial Sequence
  primer
gtaaaacgacggccagtttcccaaatcattggaaatagc

SEQ ID NO: 130575 - DNA, 40 bp, Artificial Sequence
  primer
gtaaaacgacggccagtgcctctctatacctgtttcctcc

SEQ ID NO: 130576 - DNA, 24 bp, Artificial Sequence
  primer
tgttcaaagatagtcctttcctgc

SEQ ID NO: 130577 - DNA, 19 bp, Artificial Sequence
  primer
gaaccagcgatttgtgcag

SEQ ID NO: 130578 - DNA, 21 bp, Artificial Sequence
  primer
tttcaaacaagagcccagtcc

SEQ ID NO: 130579 - DNA, 38 bp, Artificial Sequence
  primer
gtaaaacgacggccagtgaaggagaagaacatgtcggg

SEQ ID NO: 130580 - DNA, 21 bp, Artificial Sequence
  primer
tccatattacccacccacagc

SEQ ID NO: 130581 - DNA, 18 bp, Artificial Sequence
  primer
cccggaaagtggaggttg

SEQ ID NO: 130582 - DNA, 37 bp, Artificial Sequence
  primer
gtaaaacgacggccagtatcagccttgctgctgtagg

SEQ ID NO: 130583 - DNA, 38 bp, Artificial Sequence
  primer
gtaaaacgacggccagtctgtggagccagtgctgttag

SEQ ID NO: 130584 - DNA, 21 bp, Artificial Sequence
  primer
tgtgggtacagagagcagcag

SEQ ID NO: 130585 - DNA, 38 bp, Artificial Sequence
  primer
gtaaaacgacggccagtgtgtatgagagtcgcctgctg

SEQ ID NO: 130586 - DNA, 20 bp, Artificial Sequence
  primer
gtagggcagggacacagagg

SEQ ID NO: 130587 - DNA, 20 bp, Artificial Sequence
  primer
gcacaccatcttgtgagcag

SEQ ID NO: 130588 - DNA, 36 bp, Artificial Sequence
  primer
gtaaaacgacggccagtaaagtgcatgtgcacggag

SEQ ID NO: 130589 - DNA, 21 bp, Artificial Sequence
  primer
ctgccaccttactcccttgtc

SEQ ID NO: 130590 - DNA, 38 bp, Artificial Sequence
  primer
gtaaaacgacggccagttcagcgggtagctacagaagg

SEQ ID NO: 130591 - DNA, 21 bp, Artificial Sequence
  primer
gaagctaccaggttgagggtg

SEQ ID NO: 130592 - DNA, 21 bp, Artificial Sequence
  primer
gaagctggagcagtgtttgtg

SEQ ID NO: 130593 - DNA, 38 bp, Artificial Sequence
  primer
gtaaaacgacggccagtaatttgattcagggagccaag

SEQ ID NO: 130594 - DNA, 38 bp, Artificial Sequence
  primer
gtaaaacgacggccagtgtgatccagctctggtcgaag

SEQ ID NO: 130595 - DNA, 21 bp, Artificial Sequence
  primer
tctttcccgttcctgacagag

SEQ ID NO: 130596 - DNA, 38 bp, Artificial Sequence
  primer
gtaaaacgacggccagtccatccctttggcacttaatc

SEQ ID NO: 130597 - DNA, 38 bp, Artificial Sequence
  primer
gtaaaacgacggccagtcttaaggtgttcttgggccac

SEQ ID NO: 130598 - DNA, 38 bp, Artificial Sequence
  primer
gtaaaacgacggccagtctccactgcataaacctccag

SEQ ID NO: 130599 - DNA, 21 bp, Artificial Sequence
  primer
tcctacccaccaacctctacc

SEQ ID NO: 130600 - DNA, 21 bp, Artificial Sequence
  primer
taacagctccacagaccgaag

SEQ ID NO: 130601 - DNA, 21 bp, Artificial Sequence
  primer
gtgaaggctgagacactctgg

SEQ ID NO: 130602 - DNA, 38 bp, Artificial Sequence
  primer
gtaaaacgacggccagttcccagataaactgcctccac

SEQ ID NO: 130603 - DNA, 38 bp, Artificial Sequence
  primer
gtaaaacgacggccagtataccgagaagacccgttcac

SEQ ID NO: 130604 - DNA, 21 bp, Artificial Sequence
  primer
cagtgctatggcaacatttgg

SEQ ID NO: 130605 - DNA, 38 bp, Artificial Sequence
  primer
gtaaaacgacggccagttggagaactgtgtgggacatc

SEQ ID NO: 130606 - DNA, 38 bp, Artificial Sequence
  primer
gtaaaacgacggccagtaggaagagtgcagagaggctg

SEQ ID NO: 130607 - DNA, 21 bp, Artificial Sequence
  primer
tatcatgtttgcctccaaccc

SEQ ID NO: 130608 - DNA, 38 bp, Artificial Sequence
  primer
gtaaaacgacggccagttcactacctacacccaagccc

SEQ ID NO: 130609 - DNA, 20 bp, Artificial Sequence
  primer
gcacggtgttcagcaggtag

SEQ ID NO: 130610 - DNA, 21 bp, Artificial Sequence
  primer
gacataggttcctggaggtgg

SEQ ID NO: 130611 - DNA, 20 bp, Artificial Sequence
  primer
ctggtgatgacagtccaggg

SEQ ID NO: 130612 - DNA, 21 bp, Artificial Sequence
  primer
gacagctgtgagtgtgggaag

SEQ ID NO: 130613 - DNA, 38 bp, Artificial Sequence
  primer
gtaaaacgacggccagttgaaagcgcacaccactgtag

SEQ ID NO: 130614 - DNA, 38 bp, Artificial Sequence
  primer
gtaaaacgacggccagtcaagcagggatgttacagagg

SEQ ID NO: 130615 - DNA, 38 bp, Artificial Sequence
  primer
gtaaaacgacggccagtgaaggaggacaatggatctgg

SEQ ID NO: 130616 - DNA, 38 bp, Artificial Sequence
  primer
gtaaaacgacggccagttggcaataaggaggaggacag

SEQ ID NO: 130617 - DNA, 21 bp, Artificial Sequence
  primer
cactagatgtcgcccacaaac

SEQ ID NO: 130618 - DNA, 20 bp, Artificial Sequence
  primer
taaacagcacgcacaggttg

SEQ ID NO: 130619 - DNA, 21 bp, Artificial Sequence
  primer
acgtttatgtccctagcaggc

SEQ ID NO: 130620 - DNA, 21 bp, Artificial Sequence
  primer
aatgggaagttaacagcctgg

SEQ ID NO: 130621 - DNA, 21 bp, Artificial Sequence
  primer
gagaaagctcctccttccacc

SEQ ID NO: 130622 - DNA, 21 bp, Artificial Sequence
  primer
taagcctggcaagacattcag

SEQ ID NO: 130623 - DNA, 22 bp, Artificial Sequence
  primer
cataggaaagtggagctggaag

SEQ ID NO: 130624 - DNA, 40 bp, Artificial Sequence
  primer
gtaaaacgacggccagtgctgcaaacagaagacattcaac

SEQ ID NO: 130625 - DNA, 23 bp, Artificial Sequence
  primer
cagcaagactcagtaggcaaatg

SEQ ID NO: 130626 - DNA, 20 bp, Artificial Sequence
  primer
tttgctgaatttgcttgctg

SEQ ID NO: 130627 - DNA, 21 bp, Artificial Sequence
  primer
tccctcaacatgtctaccagg

SEQ ID NO: 130628 - DNA, 38 bp, Artificial Sequence
  primer
gtaaaacgacggccagtacaacctcatgatcgtggaat

SEQ ID NO: 130629 - DNA, 21 bp, Artificial Sequence
  primer
gtctgagacgtcagccatttg

SEQ ID NO: 130630 - DNA, 38 bp, Artificial Sequence
  primer
gtaaaacgacggccagtcctgtgagtccacagttgctg

SEQ ID NO: 130631 - DNA, 21 bp, Artificial Sequence
  primer
gaatcttggccagttcctgtc

SEQ ID NO: 130632 - DNA, 22 bp, Artificial Sequence
  primer
gggactgaagatggaatgacag

SEQ ID NO: 130633 - DNA, 40 bp, Artificial Sequence
  primer
gtaaaacgacggccagtgtaggtagtctggctttcacctg

SEQ ID NO: 130634 - DNA, 38 bp, Artificial Sequence
  primer
gtaaaacgacggccagtctttctttgaggcaaacgagg

SEQ ID NO: 130635 - DNA, 38 bp, Artificial Sequence
  primer
gtaaaacgacggccagttgcctgtaacataacatgccc

SEQ ID NO: 130636 - DNA, 40 bp, Artificial Sequence
  primer
gtaaaacgacggccagtccagtgaattactgaatggttgg

SEQ ID NO: 130637 - DNA, 38 bp, Artificial Sequence
  primer
gtaaaacgacggccagtgagtgtccagtgtcaagcagg

SEQ ID NO: 130638 - DNA, 38 bp, Artificial Sequence
  primer
gtaaaacgacggccagtagaatgccagattccaggtcc

SEQ ID NO: 130639 - DNA, 25 bp, Artificial Sequence
  primer
agagaattgaaggctctacaatgag

SEQ ID NO: 130640 - DNA, 22 bp, Artificial Sequence
  primer
aaccatcctatttgaagggagg

SEQ ID NO: 130641 - DNA, 27 bp, Artificial Sequence
  primer
gaatccaattcattaatctcacacatc

SEQ ID NO: 130642 - DNA, 25 bp, Artificial Sequence
  primer
aaacatttccagtcagtgatcaaac

SEQ ID NO: 130643 - DNA, 38 bp, Artificial Sequence
  primer
gtaaaacgacggccagtcagcctaagtcagaagctgcc

SEQ ID NO: 130644 - DNA, 41 bp, Artificial Sequence
  primer
gtaaaacgacggccagttctgatcctactcaggactgcttc

SEQ ID NO: 130645 - DNA, 26 bp, Artificial Sequence
  primer
tggctcttcctataagagtattccag

SEQ ID NO: 130646 - DNA, 21 bp, Artificial Sequence
  primer
ccgagtttgtgtctgatctgc

SEQ ID NO: 130647 - DNA, 24 bp, Artificial Sequence
  primer
gaacatatcctggaaatccacaac

SEQ ID NO: 130648 - DNA, 41 bp, Artificial Sequence
  primer
gtaaaacgacggccagtagtagcagtaacactgcaatgacc

SEQ ID NO: 130649 - DNA, 19 bp, Artificial Sequence
  primer
gggagctggaaactggtcc

SEQ ID NO: 130650 - DNA, 37 bp, Artificial Sequence
  primer
gtaaaacgacggccagtagggatgtgggagtgtaggg

SEQ ID NO: 130651 - DNA, 24 bp, Artificial Sequence
  primer
ttgctcctctgttgcatttatatc

SEQ ID NO: 130652 - DNA, 38 bp, Artificial Sequence
  primer
gtaaaacgacggccagttttaagagctttgctgatgcc

SEQ ID NO: 130653 - DNA, 39 bp, Artificial Sequence
  primer
gtaaaacgacggccagtggcacaggtctttcacatgttt

SEQ ID NO: 130654 - DNA, 26 bp, Artificial Sequence
  primer
ggtcactctctaggctgtttacactc

SEQ ID NO: 130655 - DNA, 21 bp, Artificial Sequence
  primer
tgtgagaaagttggtcatgga

SEQ ID NO: 130656 - DNA, 39 bp, Artificial Sequence
  primer
gtaaaacgacggccagtcattatagaccaggaaatgcca

SEQ ID NO: 130657 - DNA, 38 bp, Artificial Sequence
  primer
gtaaaacgacggccagtagcaacagatgctgacctgag

SEQ ID NO: 130658 - DNA, 27 bp, Artificial Sequence
  primer
attaatctaggagaaagtcaatgatgg

SEQ ID NO: 130659 - DNA, 38 bp, Artificial Sequence
  primer
gtaaaacgacggccagtatgtgatccttgttcaatggg

SEQ ID NO: 130660 - DNA, 22 bp, Artificial Sequence
  primer
ctactgagtctgccacacgttc

SEQ ID NO: 130661 - DNA, 21 bp, Artificial Sequence
  primer
gagacacataggcaggattgg

SEQ ID NO: 130662 - DNA, 27 bp, Artificial Sequence
  primer
aaataatcttagtccagaggtcagaaa

SEQ ID NO: 130663 - DNA, 21 bp, Artificial Sequence
  primer
tctggcagctatgctaatccc

SEQ ID NO: 130664 - DNA, 39 bp, Artificial Sequence
  primer
gtaaaacgacggccagttgcttgctttaacataggcaaa

SEQ ID NO: 130665 - DNA, 21 bp, Artificial Sequence
  primer
aggattgctggattccctctc

SEQ ID NO: 130666 - DNA, 44 bp, Artificial Sequence
  primer
gtaaaacgacggccagttttaacaattatcagcgtaagataccc

SEQ ID NO: 130667 - DNA, 39 bp, Artificial Sequence
  primer
gtaaaacgacggccagtgaaagttcacatcctggcaatc

SEQ ID NO: 130668 - DNA, 38 bp, Artificial Sequence
  primer
gtaaaacgacggccagtccacagtttcgatttcaaggc

SEQ ID NO: 130669 - DNA, 24 bp, Artificial Sequence
  primer
gcagatgaatatggattaactggg

SEQ ID NO: 130670 - DNA, 38 bp, Artificial Sequence
  primer
gtaaaacgacggccagtgctgtgagacagcaggaattg

SEQ ID NO: 130671 - DNA, 24 bp, Artificial Sequence
  primer
tgagcacatttgatgtacagtgag

SEQ ID NO: 130672 - DNA, 22 bp, Artificial Sequence
  primer
tgaacaaccatgttgtgactgg

SEQ ID NO: 130673 - DNA, 44 bp, Artificial Sequence
  primer
gtaaaacgacggccagttcaatattatatagtgccttacgggtc

SEQ ID NO: 130674 - DNA, 21 bp, Artificial Sequence
  primer
actacatgccttggctgaatg

SEQ ID NO: 130675 - DNA, 19 bp, Artificial Sequence
  primer
cagcgcttggctcctagac

SEQ ID NO: 130676 - DNA, 21 bp, Artificial Sequence
  primer
aatctgggagcaataagtgcg

SEQ ID NO: 130677 - DNA, 41 bp, Artificial Sequence
  primer
gtaaaacgacggccagtaatagcttgacttagccattccac

SEQ ID NO: 130678 - DNA, 38 bp, Artificial Sequence
  primer
gtaaaacgacggccagttggtggtggtagtagagctgg

SEQ ID NO: 130679 - DNA, 39 bp, Artificial Sequence
  primer
gtaaaacgacggccagtccttctgcccttacagtttagg

SEQ ID NO: 130680 - DNA, 21 bp, Artificial Sequence
  primer
tttccagtctgccaacaaatc

SEQ ID NO: 130681 - DNA, 21 bp, Artificial Sequence
  primer
tgcagatgggctgagttattc

SEQ ID NO: 130682 - DNA, 43 bp, Artificial Sequence
  primer
gtaaaacgacggccagtaagtaaagtgacctaacagttcgttg

SEQ ID NO: 130683 - DNA, 27 bp, Artificial Sequence
  primer
ttaatagaacacagcaggattaaattg

SEQ ID NO: 130684 - DNA, 41 bp, Artificial Sequence
  primer
gtaaaacgacggccagtcaaactgtttccaaccatgttaag

SEQ ID NO: 130685 - DNA, 21 bp, Artificial Sequence
  primer
ggatttgttggtaacaaccgc

SEQ ID NO: 130686 - DNA, 25 bp, Artificial Sequence
  primer
accaggtattggtttgtaagaaatg

SEQ ID NO: 130687 - DNA, 24 bp, Artificial Sequence
  primer
tcagtgtggtcatcattaactcaa

SEQ ID NO: 130688 - DNA, 20 bp, Artificial Sequence
  primer
aaagagagcccgacacaagg

SEQ ID NO: 130689 - DNA, 20 bp, Artificial Sequence
  primer
gtcaagaggcccacagttcc

SEQ ID NO: 130690 - DNA, 24 bp, Artificial Sequence
  primer
tcaattaaatatctgcagaaccga

SEQ ID NO: 130691 - DNA, 22 bp, Artificial Sequence
  primer
cctcaaatacaagtggctttcc

SEQ ID NO: 130692 - DNA, 42 bp, Artificial Sequence
  primer
gtaaaacgacggccagtaaatggatttgttcatcaggtacac

SEQ ID NO: 130693 - DNA, 21 bp, Artificial Sequence
  primer
ttacctctgtccactctgggc

SEQ ID NO: 130694 - DNA, 21 bp, Artificial Sequence
  primer
tatccgcaggcttggaaatac

SEQ ID NO: 130695 - DNA, 38 bp, Artificial Sequence
  primer
gtaaaacgacggccagttattcacttgccattgtgtgc

SEQ ID NO: 130696 - DNA, 41 bp, Artificial Sequence
  primer
gtaaaacgacggccagtatgtttccttgttgttatcccatc

SEQ ID NO: 130697 - DNA, 26 bp, Artificial Sequence
  primer
aaataagtgaactaaggccatctctc

SEQ ID NO: 130698 - DNA, 20 bp, Artificial Sequence
  primer
ttggacaagtgcctcaactg

SEQ ID NO: 130699 - DNA, 40 bp, Artificial Sequence
  primer
gtaaaacgacggccagttttgccattgggatatacatttg

SEQ ID NO: 130700 - DNA, 23 bp, Artificial Sequence
  primer
gaagctggtaagctatcttgctg

SEQ ID NO: 130701 - DNA, 28 bp, Artificial Sequence
  primer
gcaaatcaacatgatattaatctagacc

SEQ ID NO: 130702 - DNA, 19 bp, Artificial Sequence
  primer
ctgaagttcgagcttgggc

SEQ ID NO: 130703 - DNA, 21 bp, Artificial Sequence
  primer
ctccaggagggtactctgagc

SEQ ID NO: 130704 - DNA, 38 bp, Artificial Sequence
  primer
gtaaaacgacggccagtggcccatttatagacctgtgg

SEQ ID NO: 130705 - DNA, 36 bp, Artificial Sequence
  primer
gtaaaacgacggccagtccttctctttctcctgccc

SEQ ID NO: 130706 - DNA, 21 bp, Artificial Sequence
  primer
taccacatccaacccaattcc

SEQ ID NO: 130707 - DNA, 18 bp, Artificial Sequence
  primer
acatgccaccacacccag

SEQ ID NO: 130708 - DNA, 21 bp, Artificial Sequence
  primer
aaggacacactcttcccaacg

SEQ ID NO: 130709 - DNA, 20 bp, Artificial Sequence
  primer
caaagaaccaggaaggaccc

SEQ ID NO: 130710 - DNA, 38 bp, Artificial Sequence
  primer
gtaaaacgacggccagtttccagatctgtttcaccgac

SEQ ID NO: 130711 - DNA, 19 bp, Artificial Sequence
  primer
cacgtacgcactcaccctg

SEQ ID NO: 130712 - DNA, 21 bp, Artificial Sequence
  primer
cgctagacctgggaatcactc

SEQ ID NO: 130713 - DNA, 38 bp, Artificial Sequence
  primer
gtaaaacgacggccagttcctaaggcactctgtgcaac

SEQ ID NO: 130714 - DNA, 37 bp, Artificial Sequence
  primer
gtaaaacgacggccagtccggcctaagatgcactttc

SEQ ID NO: 130715 - DNA, 21 bp, Artificial Sequence
  primer
atccctagccacctccagaag

SEQ ID NO: 130716 - DNA, 21 bp, Artificial Sequence
  primer
gaggccttgactctcctaccc

SEQ ID NO: 130717 - DNA, 21 bp, Artificial Sequence
  primer
ggatgcacaaagtgtcagctc

SEQ ID NO: 130718 - DNA, 21 bp, Artificial Sequence
  primer
tgggatcaggaacacacagac

SEQ ID NO: 130719 - DNA, 38 bp, Artificial Sequence
  primer
gtaaaacgacggccagtacacagccaggatgacatagg

SEQ ID NO: 130720 - DNA, 38 bp, Artificial Sequence
  primer
gtaaaacgacggccagtcacagaagggtgtcaatgtgg

SEQ ID NO: 130721 - DNA, 21 bp, Artificial Sequence
  primer
agtccagacctctgttccagc

SEQ ID NO: 130722 - DNA, 18 bp, Artificial Sequence
  primer
gaccacatggtgcaaccc

SEQ ID NO: 130723 - DNA, 38 bp, Artificial Sequence
  primer
gtaaaacgacggccagttcacctgtcctgctgtttagg

SEQ ID NO: 130724 - DNA, 38 bp, Artificial Sequence
  primer
gtaaaacgacggccagtactacaaggcgctcagctacg

SEQ ID NO: 130725 - DNA, 36 bp, Artificial Sequence
  primer
gtaaaacgacggccagtaggtgcgcgcttgtaattc

SEQ ID NO: 130726 - DNA, 21 bp, Artificial Sequence
  primer
cccaagtgtaggtcaagacgg

SEQ ID NO: 130727 - DNA, 37 bp, Artificial Sequence
  primer
gtaaaacgacggccagtagctcttgccaaagcacttg

SEQ ID NO: 130728 - DNA, 36 bp, Artificial Sequence
  primer
gtaaaacgacggccagtgcagcagcgtggaactctc

SEQ ID NO: 130729 - DNA, 38 bp, Artificial Sequence
  primer
gtaaaacgacggccagtatgcacgttgagattggacac

SEQ ID NO: 130730 - DNA, 21 bp, Artificial Sequence
  primer
caagcctccctcaactaggac

SEQ ID NO: 130731 - DNA, 39 bp, Artificial Sequence
  primer
gtaaaacgacggccagtttcccaaatctccatctacgag

SEQ ID NO: 130732 - DNA, 21 bp, Artificial Sequence
  primer
tgcctgccaattcttaagtcc

SEQ ID NO: 130733 - DNA, 21 bp, Artificial Sequence
  primer
acttgttacaccacgcaaagg

SEQ ID NO: 130734 - DNA, 22 bp, Artificial Sequence
  primer
ttcacaagctccaattgttctg

SEQ ID NO: 130735 - DNA, 41 bp, Artificial Sequence
  primer
gtaaaacgacggccagttgcaaagaggctatagtgaaactc

SEQ ID NO: 130736 - DNA, 20 bp, Artificial Sequence
  primer
tgtgaactggaggtgaaccc

SEQ ID NO: 130737 - DNA, 40 bp, Artificial Sequence
  primer
gtaaaacgacggccagtccttcactcaacattcacaacag

SEQ ID NO: 130738 - DNA, 21 bp, Artificial Sequence
  primer
gttctcccaaatgaaaccacc

SEQ ID NO: 130739 - DNA, 27 bp, Artificial Sequence
  primer
cagatatttagtagtccattcgtgctt

SEQ ID NO: 130740 - DNA, 38 bp, Artificial Sequence
  primer
gtaaaacgacggccagtctgtcactcagtagcttcggg

SEQ ID NO: 130741 - DNA, 38 bp, Artificial Sequence
  primer
gtaaaacgacggccagttcgaagttctgacgaaggagg

SEQ ID NO: 130742 - DNA, 37 bp, Artificial Sequence
  primer
gtaaaacgacggccagtctggcagaggtgctgatttc

SEQ ID NO: 130743 - DNA, 38 bp, Artificial Sequence
  primer
gtaaaacgacggccagttctgggtgaaatgaagaccac

SEQ ID NO: 130744 - DNA, 21 bp, Artificial Sequence
  primer
ggcagcctgatgtaacctacc

SEQ ID NO: 130745 - DNA, 21 bp, Artificial Sequence
  primer
gccagtttcggtctctgaaag

SEQ ID NO: 130746 - DNA, 38 bp, Artificial Sequence
  primer
gtaaaacgacggccagttcaatctcaatctgggaaggg

SEQ ID NO: 130747 - DNA, 21 bp, Artificial Sequence
  primer
aaagggaggagaaccgagaac

SEQ ID NO: 130748 - DNA, 21 bp, Artificial Sequence
  primer
gaccaccctaccgagacagac

SEQ ID NO: 130749 - DNA, 37 bp, Artificial Sequence
  primer
gtaaaacgacggccagtgcctgcttatccctggaatc

SEQ ID NO: 130750 - DNA, 20 bp, Artificial Sequence
  primer
acaccaacccgttagggaac

SEQ ID NO: 130751 - DNA, 21 bp, Artificial Sequence
  primer
gaacaggagagaaggagcagc

SEQ ID NO: 130752 - DNA, 21 bp, Artificial Sequence
  primer
caactgaaggcagatgtgagg

SEQ ID NO: 130753 - DNA, 38 bp, Artificial Sequence
  primer
gtaaaacgacggccagttgatatcttctggacccaggc

SEQ ID NO: 130754 - DNA, 38 bp, Artificial Sequence
  primer
gtaaaacgacggccagtctagctggtgctctccaccac

SEQ ID NO: 130755 - DNA, 37 bp, Artificial Sequence
  primer
gtaaaacgacggccagtaggacctgccagaccctatg

SEQ ID NO: 130756 - DNA, 38 bp, Artificial Sequence
  primer
gtaaaacgacggccagttcttaaagccattcccagtcc

SEQ ID NO: 130757 - DNA, 38 bp, Artificial Sequence
  primer
gtaaaacgacggccagtcgagtagaggtagagctcggg

SEQ ID NO: 130758 - DNA, 21 bp, Artificial Sequence
  primer
ggctacagggagttgaacgag

SEQ ID NO: 130759 - DNA, 21 bp, Artificial Sequence
  primer
atctctggagcaggcagtagg

SEQ ID NO: 130760 - DNA, 38 bp, Artificial Sequence
  primer
gtaaaacgacggccagtgagaacctcaagcctctcctg

SEQ ID NO: 130761 - DNA, 39 bp, Artificial Sequence
  primer
gtaaaacgacggccagtactgactgaaacagccatgaag

SEQ ID NO: 130762 - DNA, 21 bp, Artificial Sequence
  primer
cacacacagaccctcttctcg

SEQ ID NO: 130763 - DNA, 38 bp, Artificial Sequence
  primer
gtaaaacgacggccagttagagcttcaagggcatcctg

SEQ ID NO: 130764 - DNA, 38 bp, Artificial Sequence
  primer
gtaaaacgacggccagtagttcccttcggagccattag

SEQ ID NO: 130765 - DNA, 38 bp, Artificial Sequence
  primer
gtaaaacgacggccagttgaggtcaggtggaaggaaag

SEQ ID NO: 130766 - DNA, 22 bp, Artificial Sequence
  primer
gattacaatgagctggattggg

SEQ ID NO: 130767 - DNA, 38 bp, Artificial Sequence
  primer
gtaaaacgacggccagtagctcagctaatgctcacagg

SEQ ID NO: 130768 - DNA, 21 bp, Artificial Sequence
  primer
acacacatgcttccttgcttg

SEQ ID NO: 130769 - DNA, 21 bp, Artificial Sequence
  primer
ggaaggacccaaggataggag

SEQ ID NO: 130770 - DNA, 38 bp, Artificial Sequence
  primer
gtaaaacgacggccagtcccagctgaggaaggatttac

SEQ ID NO: 130771 - DNA, 38 bp, Artificial Sequence
  primer
gtaaaacgacggccagttccagttcacagcattgttcc

SEQ ID NO: 130772 - DNA, 38 bp, Artificial Sequence
  primer
gtaaaacgacggccagttccacaatactcacagagccc

SEQ ID NO: 130773 - DNA, 21 bp, Artificial Sequence
  primer
ctgcttgaagagtgttggcag

SEQ ID NO: 130774 - DNA, 21 bp, Artificial Sequence
  primer
cttgtggtgaacgtgagcatc

SEQ ID NO: 130775 - DNA, 19 bp, Artificial Sequence
  primer
agcggaactcctcctcctg

SEQ ID NO: 130776 - DNA, 36 bp, Artificial Sequence
  primer
gtaaaacgacggccagtcacactgtaggcgctcagg

SEQ ID NO: 130777 - DNA, 37 bp, Artificial Sequence
  primer
gtaaaacgacggccagtgtctgcaggacagggctatg

SEQ ID NO: 130778 - DNA, 37 bp, Artificial Sequence
  primer
gtaaaacgacggccagtcgcagggcttgtacagagag

SEQ ID NO: 130779 - DNA, 37 bp, Artificial Sequence
  primer
gtaaaacgacggccagtcagggctagtccctctccag

SEQ ID NO: 130780 - DNA, 21 bp, Artificial Sequence
  primer
agtgcttacaggttgcacagc

SEQ ID NO: 130781 - DNA, 21 bp, Artificial Sequence
  primer
gaaccactaacccgaaacagg

SEQ ID NO: 130782 - DNA, 21 bp, Artificial Sequence
  primer
tgcctacttacaacatggccc

SEQ ID NO: 130783 - DNA, 21 bp, Artificial Sequence
  primer
agacggtgaagtagaccaggg

SEQ ID NO: 130784 - DNA, 20 bp, Artificial Sequence
  primer
gaacacggagatctgcaagg

SEQ ID NO: 130785 - DNA, 21 bp, Artificial Sequence
  primer
ataaatagcagcctggcgttg

SEQ ID NO: 130786 - DNA, 35 bp, Artificial Sequence
  primer
gtaaaacgacggccagtgcgctcctcccttctcac

SEQ ID NO: 130787 - DNA, 21 bp, Artificial Sequence
  primer
tacacatgcaatcaacggttc

SEQ ID NO: 130788 - DNA, 21 bp, Artificial Sequence
  primer
aacaacagagccgaggtcatc

SEQ ID NO: 130789 - DNA, 21 bp, Artificial Sequence
  primer
cctccacacagaagtctgcac

SEQ ID NO: 130790 - DNA, 21 bp, Artificial Sequence
  primer
tctgcccagtcctacctcttc

SEQ ID NO: 130791 - DNA, 40 bp, Artificial Sequence
  primer
gtaaaacgacggccagtggaatgtttcccaaattatctcg

SEQ ID NO: 130792 - DNA, 38 bp, Artificial Sequence
  primer
gtaaaacgacggccagttgaaacaccatgcttcaagtg

SEQ ID NO: 130793 - DNA, 38 bp, Artificial Sequence
  primer
gtaaaacgacggccagtggaaggagcatttcaaggaag

SEQ ID NO: 130794 - DNA, 21 bp, Artificial Sequence
  primer
tagggagaaggaggtggaacc

SEQ ID NO: 130795 - DNA, 21 bp, Artificial Sequence
  primer
caaatgacagcagtgagggag

SEQ ID NO: 130796 - DNA, 21 bp, Artificial Sequence
  primer
acaaccagtgctgccaataag

SEQ ID NO: 130797 - DNA, 38 bp, Artificial Sequence
  primer
gtaaaacgacggccagtagctgtctctgcaagaggtcc

SEQ ID NO: 130798 - DNA, 21 bp, Artificial Sequence
  primer
tggaagaacagtggtgagagg

SEQ ID NO: 130799 - DNA, 38 bp, Artificial Sequence
  primer
gtaaaacgacggccagtaacctccagtctgttcccttg

SEQ ID NO: 130800 - DNA, 37 bp, Artificial Sequence
  primer
gtaaaacgacggccagtctgtaagcagcagagctggg

SEQ ID NO: 130801 - DNA, 21 bp, Artificial Sequence
  primer
gtgtttatgtccatgggctcc

SEQ ID NO: 130802 - DNA, 21 bp, Artificial Sequence
  primer
tctaggcctctagggctggtc

SEQ ID NO: 130803 - DNA, 25 bp, Artificial Sequence
  primer
tttcaggttatgtcatttcaactcc

SEQ ID NO: 130804 - DNA, 21 bp, Artificial Sequence
  primer
ccagggatccaaatctcagac

SEQ ID NO: 130805 - DNA, 21 bp, Artificial Sequence
  primer
gagatgggctgaattccagag

SEQ ID NO: 130806 - DNA, 37 bp, Artificial Sequence
  primer
gtaaaacgacggccagtaggcctagcacattctgacg

SEQ ID NO: 130807 - DNA, 22 bp, Artificial Sequence
  primer
gagggatccaaacatccttctc

SEQ ID NO: 130808 - DNA, 38 bp, Artificial Sequence
  primer
gtaaaacgacggccagttttcgggtagcttgtctttgg

SEQ ID NO: 130809 - DNA, 21 bp, Artificial Sequence
  primer
ttcacacagttctgtccgtcc

SEQ ID NO: 130810 - DNA, 38 bp, Artificial Sequence
  primer
gtaaaacgacggccagtggcatgcatgggattaaacag

SEQ ID NO: 130811 - DNA, 40 bp, Artificial Sequence
  primer
gtaaaacgacggccagttcatctttgcatctggaggatag

SEQ ID NO: 130812 - DNA, 39 bp, Artificial Sequence
  primer
gtaaaacgacggccagttcaaatttaagtgggcatcctg

SEQ ID NO: 130813 - DNA, 38 bp, Artificial Sequence
  primer
gtaaaacgacggccagttcattccagcttggaactttg

SEQ ID NO: 130814 - DNA, 38 bp, Artificial Sequence
  primer
gtaaaacgacggccagtttaaactcctggactcaagcg

SEQ ID NO: 130815 - DNA, 38 bp, Artificial Sequence
  primer
gtaaaacgacggccagttcaaggtgactttgggtcaag

SEQ ID NO: 130816 - DNA, 41 bp, Artificial Sequence
  primer
gtaaaacgacggccagttgagacaatttccaatttctaccc

SEQ ID NO: 130817 - DNA, 20 bp, Artificial Sequence
  primer
tttcaagcttggctttcaca

SEQ ID NO: 130818 - DNA, 20 bp, Artificial Sequence
  primer
ctctcacatttggccagacc

SEQ ID NO: 130819 - DNA, 22 bp, Artificial Sequence
  primer
tgtgcattacacaaagtttccc

SEQ ID NO: 130820 - DNA, 20 bp, Artificial Sequence
  primer
attaagggaggaagggctcc

SEQ ID NO: 130821 - DNA, 21 bp, Artificial Sequence
  primer
caagcaatcctcctaccttgg

SEQ ID NO: 130822 - DNA, 21 bp, Artificial Sequence
  primer
ttcaagacattggacaccagg

SEQ ID NO: 130823 - DNA, 38 bp, Artificial Sequence
  primer
gtaaaacgacggccagtaggacgccgctgtagtagaag

SEQ ID NO: 130824 - DNA, 21 bp, Artificial Sequence
  primer
ccactctgacaggttggagac

SEQ ID NO: 130825 - DNA, 21 bp, Artificial Sequence
  primer
gcagctttattaaaccacggg

SEQ ID NO: 130826 - DNA, 38 bp, Artificial Sequence
  primer
gtaaaacgacggccagtctactttggatgctggcacac

SEQ ID NO: 130827 - DNA, 43 bp, Artificial Sequence
  primer
gtaaaacgacggccagttgatgaccatatctcaactctttcag

SEQ ID NO: 130828 - DNA, 38 bp, Artificial Sequence
  primer
gtaaaacgacggccagtagtcaatggctgtttgaagcc

SEQ ID NO: 130829 - DNA, 40 bp, Artificial Sequence
  primer
gtaaaacgacggccagttcatgccaatatactgcaaggag

SEQ ID NO: 130830 - DNA, 37 bp, Artificial Sequence
  primer
gtaaaacgacggccagtccctaagcaagcctctctgg

SEQ ID NO: 130831 - DNA, 21 bp, Artificial Sequence
  primer
gcaaggcccaactaccttaac

SEQ ID NO: 130832 - DNA, 37 bp, Artificial Sequence
  primer
gtaaaacgacggccagtcagaccaagccaggataggg

SEQ ID NO: 130833 - DNA, 21 bp, Artificial Sequence
  primer
acaatcagctcttccagcacc

SEQ ID NO: 130834 - DNA, 24 bp, Artificial Sequence
  primer
tttgcccaattaggattgtacttc

SEQ ID NO: 130835 - DNA, 21 bp, Artificial Sequence
  primer
cagggttgcacataccagttc

SEQ ID NO: 130836 - DNA, 22 bp, Artificial Sequence
  primer
agtttgctaaagttcctggctg

SEQ ID NO: 130837 - DNA, 43 bp, Artificial Sequence
  primer
gtaaaacgacggccagttcctccttaccttgtaaagacagatg

SEQ ID NO: 130838 - DNA, 21 bp, Artificial Sequence
  primer
aggtctggaactgttggcaag

SEQ ID NO: 130839 - DNA, 36 bp, Artificial Sequence
  primer
gtaaaacgacggccagtagatgggactgtgaagggc

SEQ ID NO: 130840 - DNA, 41 bp, Artificial Sequence
  primer
gtaaaacgacggccagtcaaagcagatatactggcacttca

SEQ ID NO: 130841 - DNA, 21 bp, Artificial Sequence
  primer
gcaatgagctcttgattgtgc

SEQ ID NO: 130842 - DNA, 21 bp, Artificial Sequence
  primer
gaggcactgccacatatttcc

SEQ ID NO: 130843 - DNA, 21 bp, Artificial Sequence
  primer
tcaggctgctgaaagcctaag

SEQ ID NO: 130844 - DNA, 21 bp, Artificial Sequence
  primer
ctggtgagaattccagccttt

SEQ ID NO: 130845 - DNA, 39 bp, Artificial Sequence
  primer
gtaaaacgacggccagtggtaaactgccattatcaaccg

SEQ ID NO: 130846 - DNA, 21 bp, Artificial Sequence
  primer
tgaatcctgcctgactctagc

SEQ ID NO: 130847 - DNA, 38 bp, Artificial Sequence
  primer
gtaaaacgacggccagtcacgctacctttgcacacttt

SEQ ID NO: 130848 - DNA, 21 bp, Artificial Sequence
  primer
ccaggagcatttctgttgttc

SEQ ID NO: 130849 - DNA, 20 bp, Artificial Sequence
  primer
cccactactgcttgctcagg

SEQ ID NO: 130850 - DNA, 21 bp, Artificial Sequence
  primer
ttgggaattaggcttctgctg

SEQ ID NO: 130851 - DNA, 21 bp, Artificial Sequence
  primer
aaacctcactgtaagggctgc

SEQ ID NO: 130852 - DNA, 23 bp, Artificial Sequence
  primer
tccagactttgaaaccaactgtc

SEQ ID NO: 130853 - DNA, 39 bp, Artificial Sequence
  primer
gtaaaacgacggccagtcgtgctagatgatggaactgac

SEQ ID NO: 130854 - DNA, 41 bp, Artificial Sequence
  primer
gtaaaacgacggccagtcatgtgtaactcctgtggaatagg

SEQ ID NO: 130855 - DNA, 42 bp, Artificial Sequence
  primer
gtaaaacgacggccagtcaatcatttcatatctccaagagaa

SEQ ID NO: 130856 - DNA, 21 bp, Artificial Sequence
  primer
gagttcacccaggaaccagac

SEQ ID NO: 130857 - DNA, 37 bp, Artificial Sequence
  primer
gtaaaacgacggccagttgcaatgccaggaagatgag

SEQ ID NO: 130858 - DNA, 21 bp, Artificial Sequence
  primer
ggtgatgttcctctaaccgtg

SEQ ID NO: 130859 - DNA, 42 bp, Artificial Sequence
  primer
gtaaaacgacggccagtctactttgacctgcttctaaattgg

SEQ ID NO: 130860 - DNA, 21 bp, Artificial Sequence
  primer
ggaatggtggaagaacagatg

SEQ ID NO: 130861 - DNA, 23 bp, Artificial Sequence
  primer
tcttctcccattgcagttaacac

SEQ ID NO: 130862 - DNA, 22 bp, Artificial Sequence
  primer
ggcatgggtatgactttactgg

SEQ ID NO: 130863 - DNA, 21 bp, Artificial Sequence
  primer
ccaccacacattcacacaatg

SEQ ID NO: 130864 - DNA, 40 bp, Artificial Sequence
  primer
gtaaaacgacggccagtggaggccaaagctctatttattg

SEQ ID NO: 130865 - DNA, 37 bp, Artificial Sequence
  primer
gtaaaacgacggccagtgttagcgacatcgcttcctg

SEQ ID NO: 130866 - DNA, 40 bp, Artificial Sequence
  primer
gtaaaacgacggccagtaacaacaaagtcagtgggaaatg

SEQ ID NO: 130867 - DNA, 21 bp, Artificial Sequence
  primer
gaagctgattgttctccagcc

SEQ ID NO: 130868 - DNA, 21 bp, Artificial Sequence
  primer
gacacatttccaccctcccta

SEQ ID NO: 130869 - DNA, 21 bp, Artificial Sequence
  primer
ctccgacttgggactcatagc

SEQ ID NO: 130870 - DNA, 19 bp, Artificial Sequence
  primer
ggagagaatgggcagggag

SEQ ID NO: 130871 - DNA, 21 bp, Artificial Sequence
  primer
tcttcttccaaacatcccagg

SEQ ID NO: 130872 - DNA, 21 bp, Artificial Sequence
  primer
tcttggtggcgaacttaaagc

SEQ ID NO: 130873 - DNA, 21 bp, Artificial Sequence
  primer
aaacctgaaatcggcacaaag

SEQ ID NO: 130874 - DNA, 38 bp, Artificial Sequence
  primer
gtaaaacgacggccagtagaaactcagtcaagcggcag

SEQ ID NO: 130875 - DNA, 21 bp, Artificial Sequence
  primer
gacatcctggcctttagcatc

SEQ ID NO: 130876 - DNA, 21 bp, Artificial Sequence
  primer
accaaacatcctactgccctc

SEQ ID NO: 130877 - DNA, 21 bp, Artificial Sequence
  primer
ttattggtccattgcctcctc

SEQ ID NO: 130878 - DNA, 38 bp, Artificial Sequence
  primer
gtaaaacgacggccagtcaaagagggtaactggcttgc

SEQ ID NO: 130879 - DNA, 38 bp, Artificial Sequence
  primer
gtaaaacgacggccagtaaggaagtgttggtggtctgc

SEQ ID NO: 130880 - DNA, 21 bp, Artificial Sequence
  primer
acaaccaagaacctgtgggac

SEQ ID NO: 130881 - DNA, 20 bp, Artificial Sequence
  primer
ttgggacaatggtccagaag

SEQ ID NO: 130882 - DNA, 19 bp, Artificial Sequence
  primer
ggtgtgggacctgaagcag

SEQ ID NO: 130883 - DNA, 21 bp, Artificial Sequence
  primer
tggaagaatagaggcagaggc

SEQ ID NO: 130884 - DNA, 37 bp, Artificial Sequence
  primer
gtaaaacgacggccagtagttccaggtggaggagcag

SEQ ID NO: 130885 - DNA, 40 bp, Artificial Sequence
  primer
gtaaaacgacggccagttggaggtgaccagggtatagaag

SEQ ID NO: 130886 - DNA, 21 bp, Artificial Sequence
  primer
cagtgcatactgggttcctcc

SEQ ID NO: 130887 - DNA, 22 bp, Artificial Sequence
  primer
gggctgtgtattattgtgagcg

SEQ ID NO: 130888 - DNA, 40 bp, Artificial Sequence
  primer
gtaaaacgacggccagtcccaaataagcgctatgtaaatg

SEQ ID NO: 130889 - DNA, 37 bp, Artificial Sequence
  primer
gtaaaacgacggccagtgaaaccggagtccctcaaac

SEQ ID NO: 130890 - DNA, 38 bp, Artificial Sequence
  primer
gtaaaacgacggccagtgtgcagtggcttattcacagg

SEQ ID NO: 130891 - DNA, 20 bp, Artificial Sequence
  primer
accttagccatgtgtcacgg

SEQ ID NO: 130892 - DNA, 19 bp, Artificial Sequence
  primer
agaaactgggcacaggcac

SEQ ID NO: 130893 - DNA, 38 bp, Artificial Sequence
  primer
gtaaaacgacggccagttccaaactgaagaggcatttg

SEQ ID NO: 130894 - DNA, 37 bp, Artificial Sequence
  primer
gtaaaacgacggccagtactgcagtacagcgtcaccc

SEQ ID NO: 130895 - DNA, 38 bp, Artificial Sequence
  primer
gtaaaacgacggccagtcacagctccatgagcctctac

SEQ ID NO: 130896 - DNA, 38 bp, Artificial Sequence
  primer
gtaaaacgacggccagtccactagcttaggcccattcc

SEQ ID NO: 130897 - DNA, 38 bp, Artificial Sequence
  primer
gtaaaacgacggccagtaagctcggccaacatagtgag

SEQ ID NO: 130898 - DNA, 21 bp, Artificial Sequence
  primer
tccctcttccctcagtgagtc

SEQ ID NO: 130899 - DNA, 21 bp, Artificial Sequence
  primer
agcaggactgaagcagagagg

SEQ ID NO: 130900 - DNA, 21 bp, Artificial Sequence
  primer
catgggctaaggtgtggtttc

SEQ ID NO: 130901 - DNA, 38 bp, Artificial Sequence
  primer
gtaaaacgacggccagtcaaacaagaaagctcctgctg

SEQ ID NO: 130902 - DNA, 38 bp, Artificial Sequence
  primer
gtaaaacgacggccagttccttctctgattctccctcc

SEQ ID NO: 130903 - DNA, 22 bp, Artificial Sequence
  primer
catgtccctatgttgcttctcc

SEQ ID NO: 130904 - DNA, 38 bp, Artificial Sequence
  primer
gtaaaacgacggccagtagtcacaactggaaagcctcc

SEQ ID NO: 130905 - DNA, 21 bp, Artificial Sequence
  primer
cccaggtctgaaatcttcctg

SEQ ID NO: 130906 - DNA, 39 bp, Artificial Sequence
  primer
gtaaaacgacggccagtggcaggatagtccagaagacac

SEQ ID NO: 130907 - DNA, 21 bp, Artificial Sequence
  primer
tcttgccctccattagagacg

SEQ ID NO: 130908 - DNA, 21 bp, Artificial Sequence
  primer
ggaaatgagaatgtgaagccc

SEQ ID NO: 130909 - DNA, 38 bp, Artificial Sequence
  primer
gtaaaacgacggccagtgggagttacctggagatggtc

SEQ ID NO: 130910 - DNA, 21 bp, Artificial Sequence
  primer
ccagagtcataggaactgggc

SEQ ID NO: 130911 - DNA, 21 bp, Artificial Sequence
  primer
aatgcccaccctctcactatg

SEQ ID NO: 130912 - DNA, 24 bp, Artificial Sequence
  primer
acattcgacagctgtaataagcac

SEQ ID NO: 130913 - DNA, 21 bp, Artificial Sequence
  primer
aagcgatcctgaatcagttgg

SEQ ID NO: 130914 - DNA, 21 bp, Artificial Sequence
  primer
agttcaggaggctatgccaag

SEQ ID NO: 130915 - DNA, 21 bp, Artificial Sequence
  primer
ccatccagaaggtgaggtcag

SEQ ID NO: 130916 - DNA, 19 bp, Artificial Sequence
  primer
acctggttctgctggcttc

SEQ ID NO: 130917 - DNA, 29 bp, Artificial Sequence
  primer
tcagggcttatatattaaggtctaacaat

SEQ ID NO: 130918 - DNA, 41 bp, Artificial Sequence
  primer
gtaaaacgacggccagtaaggatctgatgtttaaatgatgc

SEQ ID NO: 130919 - DNA, 40 bp, Artificial Sequence
  primer
gtaaaacgacggccagtggcttcagatgtttctctgttgg

SEQ ID NO: 130920 - DNA, 24 bp, Artificial Sequence
  primer
caaaggtaaagtcacctccaaatc

SEQ ID NO: 130921 - DNA, 38 bp, Artificial Sequence
  primer
gtaaaacgacggccagtttgatgggtgtgggaataatg

SEQ ID NO: 130922 - DNA, 21 bp, Artificial Sequence
  primer
aaatgctgatccaaatcatgg

SEQ ID NO: 130923 - DNA, 22 bp, Artificial Sequence
  primer
aagcattaatgggatgttctgc

SEQ ID NO: 130924 - DNA, 39 bp, Artificial Sequence
  primer
gtaaaacgacggccagtttgaatatgcatctgggacaag

SEQ ID NO: 130925 - DNA, 38 bp, Artificial Sequence
  primer
gtaaaacgacggccagtgaccctgcataaattcacctg

SEQ ID NO: 130926 - DNA, 26 bp, Artificial Sequence
  primer
ggaggtcttgtttcaatataatttgg

SEQ ID NO: 130927 - DNA, 39 bp, Artificial Sequence
  primer
gtaaaacgacggccagtgggaccaatatgtgttcaaagg

SEQ ID NO: 130928 - DNA, 43 bp, Artificial Sequence
  primer
gtaaaacgacggccagtgggatggaatgaacatttaaactatg

SEQ ID NO: 130929 - DNA, 43 bp, Artificial Sequence
  primer
gtaaaacgacggccagttggattataaccttctgttgttagcc

SEQ ID NO: 130930 - DNA, 21 bp, Artificial Sequence
  primer
gtgtgcctgaactaaacgtgc

SEQ ID NO: 130931 - DNA, 21 bp, Artificial Sequence
  primer
cttcagggaaacaactgaggg

SEQ ID NO: 130932 - DNA, 21 bp, Artificial Sequence
  primer
aaagaaatctgccatccttgc

SEQ ID NO: 130933 - DNA, 21 bp, Artificial Sequence
  primer
ttcccaaacgttgttctatgc

SEQ ID NO: 130934 - DNA, 21 bp, Artificial Sequence
  primer
attgaccaattatggttgccc

SEQ ID NO: 130935 - DNA, 38 bp, Artificial Sequence
  primer
gtaaaacgacggccagtttcctgacatttctttgctcg

SEQ ID NO: 130936 - DNA, 41 bp, Artificial Sequence
  primer
gtaaaacgacggccagtttggtaagtataagcaaagccagc

SEQ ID NO: 130937 - DNA, 38 bp, Artificial Sequence
  primer
gtaaaacgacggccagtcctggcagataggaaatggtc

SEQ ID NO: 130938 - DNA, 39 bp, Artificial Sequence
  primer
gtaaaacgacggccagtaactgcaagactggaagacagc

SEQ ID NO: 130939 - DNA, 38 bp, Artificial Sequence
  primer
gtaaaacgacggccagtgcatgtttctaaggctgtggc

SEQ ID NO: 130940 - DNA, 21 bp, Artificial Sequence
  primer
tcctaagaatccgtttgtccc

SEQ ID NO: 130941 - DNA, 21 bp, Artificial Sequence
  primer
tgctttctacgtgaagggttg

SEQ ID NO: 130942 - DNA, 21 bp, Artificial Sequence
  primer
acatctggaaggtgggaagtg

SEQ ID NO: 130943 - DNA, 21 bp, Artificial Sequence
  primer
cccaccacccaaagttaacac

SEQ ID NO: 130944 - DNA, 39 bp, Artificial Sequence
  primer
gtaaaacgacggccagttcttctactgctctttgccagg

SEQ ID NO: 130945 - DNA, 21 bp, Artificial Sequence
  primer
atttggctcattgcctgtacc

SEQ ID NO: 130946 - DNA, 21 bp, Artificial Sequence
  primer
gtttacgaagagcccagttcc

SEQ ID NO: 130947 - DNA, 24 bp, Artificial Sequence
  primer
tgatgcaaattgttattatgggtc

SEQ ID NO: 130948 - DNA, 18 bp, Artificial Sequence
  primer
ggcgattccactcacagg

SEQ ID NO: 130949 - DNA, 38 bp, Artificial Sequence
  primer
gtaaaacgacggccagttaaaccagtcaacatccgtgg

SEQ ID NO: 130950 - DNA, 21 bp, Artificial Sequence
  primer
aatctcgcttggaaagaatcc

SEQ ID NO: 130951 - DNA, 21 bp, Artificial Sequence
  primer
agtcagaccagggtcaacagg

SEQ ID NO: 130952 - DNA, 21 bp, Artificial Sequence
  primer
ctaccctggccaaactttctg

SEQ ID NO: 130953 - DNA, 22 bp, Artificial Sequence
  primer
ttggtttctacagaccctgagc

SEQ ID NO: 130954 - DNA, 39 bp, Artificial Sequence
  primer
gtaaaacgacggccagtacaggatgtgttacctggcttc

SEQ ID NO: 130955 - DNA, 21 bp, Artificial Sequence
  primer
atcacagccagaggaaattcg

SEQ ID NO: 130956 - DNA, 37 bp, Artificial Sequence
  primer
gtaaaacgacggccagttgggaccaactgacctgttc

SEQ ID NO: 130957 - DNA, 21 bp, Artificial Sequence
  primer
ggaggcagaggttaaggtgac

SEQ ID NO: 130958 - DNA, 27 bp, Artificial Sequence
  primer
aagaatacatccataaagagcagtttc

SEQ ID NO: 130959 - DNA, 38 bp, Artificial Sequence
  primer
gtaaaacgacggccagttttccactactccaaggctcc

SEQ ID NO: 130960 - DNA, 37 bp, Artificial Sequence
  primer
gtaaaacgacggccagtatttccctgcctgctgaaag

SEQ ID NO: 130961 - DNA, 38 bp, Artificial Sequence
  primer
gtaaaacgacggccagtgggcataaataggaatccgtc

SEQ ID NO: 130962 - DNA, 39 bp, Artificial Sequence
  primer
gtaaaacgacggccagtccagacaacacaaataccaccc

SEQ ID NO: 130963 - DNA, 22 bp, Artificial Sequence
  primer
aaatacaatgccaagtcccttt

SEQ ID NO: 130964 - DNA, 21 bp, Artificial Sequence
  primer
gcaaagagccaatacaactgg

SEQ ID NO: 130965 - DNA, 23 bp, Artificial Sequence
  primer
gaagactggaaccagagaccttc

SEQ ID NO: 130966 - DNA, 21 bp, Artificial Sequence
  primer
tgaattactgaagcctgtggg

SEQ ID NO: 130967 - DNA, 44 bp, Artificial Sequence
  primer
gtaaaacgacggccagtcatacaatctatatgcctaatggatgc

SEQ ID NO: 130968 - DNA, 37 bp, Artificial Sequence
  primer
gtaaaacgacggccagttttcatggcctgacaatgct

SEQ ID NO: 130969 - DNA, 21 bp, Artificial Sequence
  primer
cattcagccttcattctggac

SEQ ID NO: 130970 - DNA, 22 bp, Artificial Sequence
  primer
aaatggatggaaccaagaaatg

SEQ ID NO: 130971 - DNA, 21 bp, Artificial Sequence
  primer
tgagcgagtctctctttctgg

SEQ ID NO: 130972 - DNA, 20 bp, Artificial Sequence
  primer
gctgtcaaggctgaaccatc

SEQ ID NO: 130973 - DNA, 21 bp, Artificial Sequence
  primer
tatatgtcggaccaaggtggc

SEQ ID NO: 130974 - DNA, 37 bp, Artificial Sequence
  primer
gtaaaacgacggccagtcacacagtccctgtggttcc

SEQ ID NO: 130975 - DNA, 38 bp, Artificial Sequence
  primer
gtaaaacgacggccagtcacacaacagggttcatttgg

SEQ ID NO: 130976 - DNA, 39 bp, Artificial Sequence
  primer
gtaaaacgacggccagtggatctgaggttcagtctgtcc

SEQ ID NO: 130977 - DNA, 21 bp, Artificial Sequence
  primer
gagcataatgccttcaggaaa

SEQ ID NO: 130978 - DNA, 43 bp, Artificial Sequence
  primer
gtaaaacgacggccagttgtctatgaatttggcttaatgatcc

SEQ ID NO: 130979 - DNA, 21 bp, Artificial Sequence
  primer
aggactaccttctctccaccg

SEQ ID NO: 130980 - DNA, 21 bp, Artificial Sequence
  primer
tgtttctggaggtagacaggg

SEQ ID NO: 130981 - DNA, 18 bp, Artificial Sequence
  primer
catttctgcatttgcgcc

SEQ ID NO: 130982 - DNA, 23 bp, Artificial Sequence
  primer
ctagggaaagggaaagaagtgag

SEQ ID NO: 130983 - DNA, 43 bp, Artificial Sequence
  primer
gtaaaacgacggccagtaaattgacaataccagtttagctcac

SEQ ID NO: 130984 - DNA, 24 bp, Artificial Sequence
  primer
tcaaccatttcagaggataacaac

SEQ ID NO: 130985 - DNA, 21 bp, Artificial Sequence
  primer
agagtgccctatattggctga

SEQ ID NO: 130986 - DNA, 40 bp, Artificial Sequence
  primer
gtaaaacgacggccagtccattaatgttctctcccgtatg

SEQ ID NO: 130987 - DNA, 39 bp, Artificial Sequence
  primer
gtaaaacgacggccagttccattgaacagaattgctcag

SEQ ID NO: 130988 - DNA, 39 bp, Artificial Sequence
  primer
gtaaaacgacggccagtgcaggtgcctactaaactgcta

SEQ ID NO: 130989 - DNA, 23 bp, Artificial Sequence
  primer
ttagcgcaagatatgaagaatcc

SEQ ID NO: 130990 - DNA, 21 bp, Artificial Sequence
  primer
cagcaaaggacccaaacattc

SEQ ID NO: 130991 - DNA, 22 bp, Artificial Sequence
  primer
aaatctccagcacttggatagg

SEQ ID NO: 130992 - DNA, 20 bp, Artificial Sequence
  primer
tccgggcatttatcttcctc

SEQ ID NO: 130993 - DNA, 38 bp, Artificial Sequence
  primer
gtaaaacgacggccagtaatgggccataaattgaaagg

SEQ ID NO: 130994 - DNA, 39 bp, Artificial Sequence
  primer
gtaaaacgacggccagtttcttaagcacaatagccggac

SEQ ID NO: 130995 - DNA, 38 bp, Artificial Sequence
  primer
gtaaaacgacggccagtagtacacagaaagtgcctggg

SEQ ID NO: 130996 - DNA, 37 bp, Artificial Sequence
  primer
gtaaaacgacggccagtctcatgcgaagaagggacac

SEQ ID NO: 130997 - DNA, 21 bp, Artificial Sequence
  primer
acaggtgaggcatagaggtgc

SEQ ID NO: 130998 - DNA, 21 bp, Artificial Sequence
  primer
cctaagtcacacactggctgc

SEQ ID NO: 130999 - DNA, 21 bp, Artificial Sequence
  primer
ctgctgactagaggcaaaggg

SEQ ID NO: 131000 - DNA, 21 bp, Artificial Sequence
  primer
gtgcttccaaaccaaaggttc

SEQ ID NO: 131001 - DNA, 38 bp, Artificial Sequence
  primer
gtaaaacgacggccagtggagcatcagcagagccttag

SEQ ID NO: 131002 - DNA, 22 bp, Artificial Sequence
  primer
tctccagggtgtgtgtgtttac

SEQ ID NO: 131003 - DNA, 22 bp, Artificial Sequence
  primer
ttatggcctctctcctcctttc

SEQ ID NO: 131004 - DNA, 20 bp, Artificial Sequence
  primer
ggaaagtttcactgggcatc

SEQ ID NO: 131005 - DNA, 21 bp, Artificial Sequence
  primer
gctaagagccatgaggcattc

SEQ ID NO: 131006 - DNA, 38 bp, Artificial Sequence
  primer
gtaaaacgacggccagtctgaacccagttagggtaggg

SEQ ID NO: 131007 - DNA, 40 bp, Artificial Sequence
  primer
gtaaaacgacggccagttgagtgattatctgaaagcagca

SEQ ID NO: 131008 - DNA, 21 bp, Artificial Sequence
  primer
ctgggagactggagacaactg

SEQ ID NO: 131009 - DNA, 21 bp, Artificial Sequence
  primer
gccagcatttggaaatcatta

SEQ ID NO: 131010 - DNA, 38 bp, Artificial Sequence
  primer
gtaaaacgacggccagtggacccttcacagaaacaagg

SEQ ID NO: 131011 - DNA, 24 bp, Artificial Sequence
  primer
acacagtgtccaactactgttgtg

SEQ ID NO: 131012 - DNA, 24 bp, Artificial Sequence
  primer
ttcagttaagtccaagaccatgtg

SEQ ID NO: 131013 - DNA, 19 bp, Artificial Sequence
  primer
gcccaagcaatcctcttcc

SEQ ID NO: 131014 - DNA, 26 bp, Artificial Sequence
  primer
aaacaattcttcattattcgaacttg

SEQ ID NO: 131015 - DNA, 43 bp, Artificial Sequence
  primer
gtaaaacgacggccagtaattgctatgaagttaaaccaaagaa

SEQ ID NO: 131016 - DNA, 40 bp, Artificial Sequence
  primer
gtaaaacgacggccagtccagctggagagacaatatgagg

SEQ ID NO: 131017 - DNA, 22 bp, Artificial Sequence
  primer
ccgcaaatatcatgtgtgtttc

SEQ ID NO: 131018 - DNA, 38 bp, Artificial Sequence
  primer
gtaaaacgacggccagttagcccaggcaatcatttatc

SEQ ID NO: 131019 - DNA, 25 bp, Artificial Sequence
  primer
cgtacattattggtggtttccatag

SEQ ID NO: 131020 - DNA, 41 bp, Artificial Sequence
  primer
gtaaaacgacggccagtcaataccctctaactggtgtcaaa

SEQ ID NO: 131021 - DNA, 24 bp, Artificial Sequence
  primer
ggcaccatgtatagaagttagcaa

SEQ ID NO: 131022 - DNA, 44 bp, Artificial Sequence
  primer
gtaaaacgacggccagtttccactgaaactcttaagaataactc

SEQ ID NO: 131023 - DNA, 38 bp, Artificial Sequence
  primer
gtaaaacgacggccagtagaagagactggagcaaaccg

SEQ ID NO: 131024 - DNA, 38 bp, Artificial Sequence
  primer
gtaaaacgacggccagtttcctttcctgagtgcctagc

SEQ ID NO: 131025 - DNA, 21 bp, Artificial Sequence
  primer
cagcaggtaagatttgccagg

SEQ ID NO: 131026 - DNA, 21 bp, Artificial Sequence
  primer
ctatctttgacaccaaccggc

SEQ ID NO: 131027 - DNA, 21 bp, Artificial Sequence
  primer
ctgccttccagatctccattc

SEQ ID NO: 131028 - DNA, 39 bp, Artificial Sequence
  primer
gtaaaacgacggccagttgcttcaaagtgaagagcaaag

SEQ ID NO: 131029 - DNA, 37 bp, Artificial Sequence
  primer
gtaaaacgacggccagtcaaatgatccactcgccttg

SEQ ID NO: 131030 - DNA, 21 bp, Artificial Sequence
  primer
cagccctctatgtattccacg

SEQ ID NO: 131031 - DNA, 19 bp, Artificial Sequence
  primer
gctcagcctggtctggaac

SEQ ID NO: 131032 - DNA, 21 bp, Artificial Sequence
  primer
gagatgcgaacctcatgtgtc

SEQ ID NO: 131033 - DNA, 37 bp, Artificial Sequence
  primer
gtaaaacgacggccagtcatccttccatgtgtcctgg

SEQ ID NO: 131034 - DNA, 21 bp, Artificial Sequence
  primer
aaggtgacctccaatgaccac

SEQ ID NO: 131035 - DNA, 38 bp, Artificial Sequence
  primer
gtaaaacgacggccagttccgtctcactctcaaagctg

SEQ ID NO: 131036 - DNA, 38 bp, Artificial Sequence
  primer
gtaaaacgacggccagtcctggaagaggaatcaagagg

SEQ ID NO: 131037 - DNA, 20 bp, Artificial Sequence
  primer
agtgagtccagcgtctgtgg

SEQ ID NO: 131038 - DNA, 21 bp, Artificial Sequence
  primer
agtatacacgctggcctgctc

SEQ ID NO: 131039 - DNA, 38 bp, Artificial Sequence
  primer
gtaaaacgacggccagtccacaggcagcttactcactg

SEQ ID NO: 131040 - DNA, 37 bp, Artificial Sequence
  primer
gtaaaacgacggccagtcttcccgacttgaatcctcc

SEQ ID NO: 131041 - DNA, 20 bp, Artificial Sequence
  primer
agcctatgcagcatgtgtcc

SEQ ID NO: 131042 - DNA, 21 bp, Artificial Sequence
  primer
acagagcgagactccatctca

SEQ ID NO: 131043 - DNA, 40 bp, Artificial Sequence
  primer
gtaaaacgacggccagtgctttcagttaatgtgatagccc

SEQ ID NO: 131044 - DNA, 20 bp, Artificial Sequence
  primer
atgaagctccttgcatgctg

SEQ ID NO: 131045 - DNA, 38 bp, Artificial Sequence
  primer
gtaaaacgacggccagtttgcccacagctctgttattc

SEQ ID NO: 131046 - DNA, 39 bp, Artificial Sequence
  primer
gtaaaacgacggccagtaatgaagaagtcgataaagccg

SEQ ID NO: 131047 - DNA, 21 bp, Artificial Sequence
  primer
atataaacgggtcctgccaag

SEQ ID NO: 131048 - DNA, 38 bp, Artificial Sequence
  primer
gtaaaacgacggccagttacaagtcgggtttgagaagc

SEQ ID NO: 131049 - DNA, 37 bp, Artificial Sequence
  primer
gtaaaacgacggccagtgtgacgggcaactgtaatcc

SEQ ID NO: 131050 - DNA, 42 bp, Artificial Sequence
  primer
gtaaaacgacggccagtttactagaaatgaagaacagccagg

SEQ ID NO: 131051 - DNA, 21 bp, Artificial Sequence
  primer
atcatcctcactttccaaggc

SEQ ID NO: 131052 - DNA, 37 bp, Artificial Sequence
  primer
gtaaaacgacggccagttcgagagcagctcaagcaac

SEQ ID NO: 131053 - DNA, 23 bp, Artificial Sequence
  primer
cagaatctggaactgatacctgg

SEQ ID NO: 131054 - DNA, 38 bp, Artificial Sequence
  primer
gtaaaacgacggccagtcatttccagacttggtcaggc

SEQ ID NO: 131055 - DNA, 41 bp, Artificial Sequence
  primer
gtaaaacgacggccagtgcagctttcacttacaaagtttcg

SEQ ID NO: 131056 - DNA, 38 bp, Artificial Sequence
  primer
gtaaaacgacggccagtagaggctaaccaaggttgtgg

SEQ ID NO: 131057 - DNA, 21 bp, Artificial Sequence
  primer
ttaataacagccttcgggtgg

SEQ ID NO: 131058 - DNA, 21 bp, Artificial Sequence
  primer
caaacactggctagatgagcg

SEQ ID NO: 131059 - DNA, 40 bp, Artificial Sequence
  primer
gtaaaacgacggccagtagctttagagctgtgttctccac

SEQ ID NO: 131060 - DNA, 23 bp, Artificial Sequence
  primer
tcaatattatcatggcttctggg

SEQ ID NO: 131061 - DNA, 18 bp, Artificial Sequence
  primer
tgtgggacacggatggag

SEQ ID NO: 131062 - DNA, 21 bp, Artificial Sequence
  primer
ttaggcttcaagagggtttgg

SEQ ID NO: 131063 - DNA, 38 bp, Artificial Sequence
  primer
gtaaaacgacggccagttcaaggctagggcttcttctc

SEQ ID NO: 131064 - DNA, 21 bp, Artificial Sequence
  primer
gaggtatcattggctgccttc

SEQ ID NO: 131065 - DNA, 38 bp, Artificial Sequence
  primer
gtaaaacgacggccagtcggtaaatttcacaagccacc

SEQ ID NO: 131066 - DNA, 38 bp, Artificial Sequence
  primer
gtaaaacgacggccagttgagaccattagcttcaacgg

SEQ ID NO: 131067 - DNA, 21 bp, Artificial Sequence
  primer
aaagcctctcacctgttgtgc

SEQ ID NO: 131068 - DNA, 38 bp, Artificial Sequence
  primer
gtaaaacgacggccagtcaatatggatgccttggacac

SEQ ID NO: 131069 - DNA, 17 bp, Artificial Sequence
  primer
gtaaaacgacggccagt
